United States Patent Application Publication US 2026/0357256 A1 - sequence listing, part 22

SEQ ID NO: 9 - DNA, 58617616 bp, Homo sapiens (residues 45,591,484-47,762,506 of 58,617,616)
  source 1..58617616: mol_type = genomic DNA
aggcgggcgaagcggagtgggtgggccacagccaggtagcggtccaccgagatgcagcacaggaaggcgatgctgatgtagatattggtgtagaagatgaacccaaagagcttgcaggacccggggccgtggatccagttgtcgtggtgcaggaagtagtccacccacagcggcagcgtgcagatgtacagcaggtcggcgatgctgaggttcatcaggtagacgcccagctcgttgcgctgttgcacctggcggtaggccgcccacagagccaggcagttggtgggcagccccacgccgatgacaaagatgtagagggatggcggaaagaggtggtccacgcgcgagtccacgtggcagccctcccacgtgtggttgcccatggtgggcacttcggcttctggggcgcttcccctggcccacgggggctgtggggccacagggagcgggaggccatggggccccctgagccccttccttggaggctcaggggaacatggtgggatgtggtctacagggaagagatgaggttgggtaggctgggctgggctgggaagggcagagcttgagagggaaaagttggaggagggatggaattatgacaggagggaagtctggaggatggtgagattaataaagaggtttttcaaggaggttatgtatggagtcagtgtgtcaacgagggagtatgggggtgacacaaaaattggtctccgggagtgtttatggaggagacgaaagcatcgctgggcaatggtgagaaggagatggtttgcagggcaattaggaagtatgtgtagccatattgaagtaataatggcgggggaatgttctagaagacacaagaaatacatgagaaagtgttgagataggacacagcgcagttagggagtgttggaaagttcaggcaatgtgggtgggagtgctggcatttcctaggaccccagaaagcaacagagataagtaaggtcaccagtaaggagaaggttctggaaaaggaggtgtctggcacagggtggacaaagataaaaggctcggtctgtggacggcaggaaggagtcttaggaaacaggaaggaggtgagtaaggtctagatcagaggtaagtttggggacggaagggaaatttcaatgggggcaggggagggactccagactggtcctggtgggggctgagggattgggatgaagtcagttcaccgctgactgcagtgcctgttgggagagaggacagcagtgagggagtcatggacactccaaccttcttctccccacactcctcaccataattgctgtgaactgcagagactggacaccccaacaatgcctacttcagccccatcctaagcaaccactctctgaaaacacagatttgaggtgtcaggcatattttcccctgacagatattagaataaagacccaactcaggccgggtgcagtggctcatgcctgtaatctcaacactttgggaggccgaggtgggaggttcgcttgagcctaggagttcaagaccagcctgggcaatgcagtgagacccagtctctacaaaaaataaaaataaaaatattagccaggtgtggtggtacatacctgtagtcacagctactggggaggctgaggtaggaggatcacttgatcccaggggattcaggctgtagtgagctataatcacaccacggcactccagcttgggcaacagagtgagaccctgtctcaaaaaaaaaaaaaaaaaaaaaggtagggtgtggtggctcgcacctgtaatcccagaactttgggaggccgaggcaggcagatcacgaggtcaggagttcaagaacagcctggccaacatggtgaaaccccatctctactaaaaatacaaaaattagctggatgtggtggcacgtgcctgtaatcccagctacacaggaggctgaggcaggagaattgcttgaaaccaaaaggcggaggttgcagtgagctgagatcgcaccactgcactccagcctgggcaaaagagtaaaactctgtctcaaaaaaaaaagaagaaaagaaaaaaaagaaaaaaaaaaggaaagaaagaaagagaaaaagggaaaaaaatgacccaactcagattttagcattttcctgcagaattcctgtaaaactggcacaggtatcatatcatgcttcaggaaatgccagactagtctaactctatcatgtcacagacagggagaaggggcccagagaggctgagtcacctccctaaggatgcacagcatggcagcaatagggccagggctggggccagcctcccactccttacccaagaatcccattcttgtcaacaaggataataacagcaaacgttaattgagccctactacatagcagatcccattccaggcatttttatgcatattatttctttttatttatttattttttgagacagggtcttgctcttttgtccagactagaatgcagtagcacgatcacagctcacagcagcctcaacctcctgggcttccagtgatcctcctgcctcagcctcccaagtagctgggaacacaggcatgcaccaccatgcctggcttaaaaaaaaaaaaaaaaaatatatatatatatatatatatatatatataaaatagatgcaggtcttcctgtgttgcccaggctggtctcttgaactcctgagctcaagagatccttccctgtaatcgcagcactttgggaggctgaggcgggcggatcatgaggtcaagagatcaaaaccatcctggccaaaatggtgaaaccctgtctctactaaaaatacaaaaattagctgggcatggtggcgcacacctgtagtcccagctactcaggaggctgaggcaggataatcgcttgaacctgggaggcgaaggttgcagtgagctgagatcacgccattgcactccagcgggggtgacagagccagactccgtctcaaaaaaaaaaaaaaaaaaaaagagatcctcccaccttggcctcccaaaatgctaggattataggagtgagccaccatgcccggccaatttatggatattacttctttgaaattttcaagactcctatgaggaaagtagttgttctttctctttgacaaactgaggcacagagctgttccaagacctgtccaaggtcctgatgtctagagtgcagccatctctgctctcagtcctcatctccagcctgtgcttcagtttccaccccagaataactggacaggccaggcacagtggctcatgcctgtaatcccagcactttgggaggccaaggcgggaggatcgcctgaggtcaggagttcaagatcagcctggccaacatggtgaaaccctgtctctactaaaaatacaaaaattagctgggcgtggtggcacatacctgtaatcccagctactcgggatgctgaggcgagaggattgcttgagcccaggaggcagaggttgcagtgagctgagatagcatcactgcactccagcctgggagacaagagaggaactccatctcaaaaaaaagaagtccaggcacggtggctcacgcctgtaatcccagcactttgggaggccaaggcgggaggatcacctgaggtcgggagttcgagaccagcctgaccaacatggagaagccctgtctctactaaaaatacaaaataagctaggtgtggcggcacatgcctgtaatcccagctacttgggaggctgaggtgggagaattgcttgaacccgggaggcagaggttgcagtgagctgagatggtgccattgcactacagcctgggcaacaagagcgaactccatctctaaataaataaataaataaataaataaataaataaataaataaaaaataactggacagaaaagggccctgggctgccagtggggactgggaaccaaagctgcagaggagtaagggaaaggggagagccaggagctgctgggaacagtcaaggtcaagatcaagatcagggagcatggggaagccctggggttagcgccagcagtctcctccctcagggaccactctcttcactgtctctgccctttcccccgcaattttcctgagtgagaaccttgagcctgtcacccactttgttctgggaagatctgcatacacagggcaaaggatattcatggaccaagcccctgactatcatcaaccccgcagagaagcagagccaagtccagagtcacaggcagcttcaggagccattccatccaggggtcttttggtttagttcttttggacgtgaaacctggctttttttttttttcccccaacaagatcttaaccagaaaccaatctaaaacagtgaaaagggtgagctgctagctgctctggtgaaacaaggtgggggtggagaggccacctctgaagaatccccaggatgcacttttaaaacatgttaaaaatggagtttaaggtggagtctattgacaaatgaggaaaccaatccccagagaggggacggaaggaggtccatgggagcctcccagatgccagagcatctttccatgggaaagtcctctgggctccacctccccagtgcttcctgaatctgtgtgcgtctctctcaaacgcctgccactgtccactctgcgtcagcatcagcgtcatcactcgctgggatcattgcagtagcatcaccattgcttttctgggctactctggcttccttcaaatcacttcccatatggcagccagaaagatctttcttttcttttcttctttttttttttttttttgagatggagagtttcactcttgtcacctaggctggagtgcaatgtcccaatcttggctcaccacaacctctacctcccgggttcaagtgattctcctgcctcttcctctggagtagctgggattacaggcatgcgtcaccacgctcagctaattttgtatttttagtagagacagggtttctccatgttggtgaggctggtctcgaactcctgacctcaggtgatccacccaccttggcctcccaaagtgctgggattacaggcgtgagccaccgcgcccgggcaagatctttctatcatgaaaatcagctctttcttttcttcttttcttttctttctttctttcttttttttgagacagggtctcactctgtcatgcagtagtgcaatcttgactcactgcagtcttgacctcatgggctcaagccatcctcccacctcagcctcgtaagtggctgggactacaggtgtgtgccaccacacctggctaatcgttctattttttgtggagatggggtttccccatgttgcccaggccggtctccaactcctgggctcaaaagatcttcctgccttggcctcccaaagtgctgggattacaggcatgagccaccacatgcagcctagttcttgttacttccctgcttgaaaccctccaatggcttctgaatggacttgcggtaaaatccagactcctcatccggagtcacaaggttctgtctgacctgctggggcagcctagccaatctcactcacctctccttcctgcctcagcagtctcaaggccagtgagtgaccttctttccagcctcaaacctttgcacacttaccatactctcagtctggaatgctcttttttttttttggagacagaatcttactctgtcgcccaggctggagtgcagtggcacgatctcggctcactgaaacctccgccacctgggttcaagtgagtctcctgccttggcttcctgagtagttgggattacaggtgtgcaccaccatgcccagctaatttttgtatttttagtagagatggggttttaccatgttggccaggttggtctcgaactcctgttctccagtgatccacccaccttggcctctcaaagtgctgggattacagatgtgagccactgctcttccttcagatagtctgagtagctccgttccctccttcacttcctcgggagtccctctccattcagtccccgactctcccctgccccaggaccctctcctcacatcaccctgttttgtttgtgtctgtctgcctagaataggttgtccaggagggcagagactttgtgtgccttgttgactgctgtatccccagcatccaggacaggcccagcatacagtaggtgctcaataaattaccaaggtcatggtcagggagcacagagccatttgccaatggcaaaaaccattccagaagctttgcagaggccagaggcatggagtaaaaacatactctctgcccatgaggctgccccaccccaccccaggctcaaacaagggcatggggaggagggggaagggagggagaggagtccattcccaggggaagaggtggtcaggggagagctggaaagggcaagatctatccgcttcttaattgactttgaaaggtcagggctgagtcgtgctcagtaagtcctgccccctgtggggtcctcagcggcagagctgcctcccccaccccagactcttgggcagaagcttgtgggtcctgtggagatgggatgggtgggggcgtactccaggctggaacagtgtgatccagtccctcccttccacttgaaacctcccacccagaccaagtcactcaaaataacctccctcccctctcctctgccctctctctccccatctctctgcccctagtctctcccttcctcctgtgacatttagagaattaggtctccaggagcctcagtttctcccttctgtaaaagggggcacaggctttatagtcatcacatcacagaccggaacgtccttgctagaatgcgatatcagctccgtaacatgcagtatttgaacgattattattattccacggggactagggggctgagacaagaaataaaccggttcttcatggcaggagacacccaccgagggctagaagtcccctttgccccactttctatcgacccccagggctctgctgacctaactcgggtacccgggcaggagacacttccggcagccagaggaggaaatacacttcccattgctaatttcctcaagggggaaccggtccagctctcacccctcctccctcccacccctcctccccaacctgctggcatcttgcggatgctggacatgggggggaggggtgcccagacagccctctcttcttccccacgtgagatctgcccaacgtggaaaccccaaaagtcagcatggaacgtcagactcttagaacgccacagtgcagccgacgtatgtgtggcagctgggagtgtgaggctatttctgaccccttcctggtacagatggggaaaccgaggcccgcagcagcaaggcagttgtctaagtcacttgatgtctcaagactgggcaaacctcctgtcgctgttaactaaacagcttcccttcccctgaggtttttctcttcactctctgaacttctgtaatttttctcaagtctttctgagcgtctctggcccctctgagaacctactagaagatacgaccttctccccacaaagaaagcaagcgaccttccatcacctgatccccataaccccgttccccttccaggaccctctctggttgggatctaagttctgccccttaggctctgttgagggggtaaacccccaaatctcacatccacaagaagctccccctgtctgtcccacaggcccccacttcttgggtccctgctggccccttccagagagtcggggggaagagaaatatacccaaggatggagagatggtggggggacaggaaagactaggaagacctggcccccccaactttagcagcctcggctgccgcatcctgccagccaccccaaaatccagcaaagctgaaaaacttggaggattttgaggacaagagggagaagtgctacagccccccgcatcccccagcacccctgggctcactcaccagccttgtccccgatgccaccaggctatctcacctcccccttttcctcctctgtgggctcctgctcccaccacccccccctccccgccttctccctgcagccccaagggaccagccagctccggtctgctcattagggacgaaatgtgatcactggtcctcgctccccacctggtgccctggcggccggcggaaaccagggggcaatcgggctaccctaacggccccactgcacctcagtatccctgtttcaaccgagagggtctctgtgcccccaaagcccacactgcctactagggataccagtccttagatggcctctctgacgttctaggtctctatggttctgcagtcttcaggttctatccttagttcacttcgcagttgaatgttctattataacattctagagcgttactcttctttcattctatttattacatcgtggctttgtaagtacctaccctaagtttccaatattctaggagtgtcacattccaagattcgaaagttctattgttagaacacgctatgatttttttaagcattctatgactttcataatctattattaaacgctcagtgatttttatctttccccagcaaacaggaatatgtatttcccttttctcttttacagaaatgggaacatacactaaatacggtgagccccacttccttttctttccccccttctctcgcctgcttttgaacattccagcagcctgatttctaagattgtgcagaattctaagaaattatggcttcatggagggaagagaggggcgtgttagtcaccacctccacctggcccctaaattctcaccacctgggggtgacatgctatatccaggccgcctctctaccctttcgctagtgggcctagcctcagccctccccgctcacaccagctgagttattatttgtctagacacaaaccaaattataggccctgtccccgagggaacggtgggctccaggcggagggtcaggagactgaagctggagttaatcccggttcccctccacctccctccctctcttcccgaaactccaccccttccacccaaaccaactattgcccctctccctccccaccaccatggttttggaaatattttctctcctctgcttctaaaaccctcccttctggattccagccatttctactcaccctggcatctctccctcctcattgagaagacctctttccccaaattaatccgacttagtggtagcagaagaagccagctctgtggatttgggcttcagttgaaaactggggtcccaaccctccagcctggcactgactcactgtggggacttctgcttttggacctcagtttctccatctataaaatgggggcagggggagttggcctaggtggctccgcaaaccctttccagctctcagctgccatcactgaaacgtgccaagatttcaacactcctctttttggattgaaggactccagtatccccaggacctttgattggaaagatctggaattcccaggcctcccctccaatgcttcttccatctgggcccttccattcaaagatgttcacattcaaggtacttgatcataggattcccagggttccaggagcccctatgggtctttcatcctcttcagctgggattcccccagaaaagaaaacctcctcatcctcaccccaaacctgaagtcaagttcatctacaaagacagaggtgggggcggatacccccttggtgggctcaggaggaggggggctgatggtgggctctggagggggaactggggggtgtggccccatcctctccacttctgcgccaaacaaattccccaatgcatatccagcctgagtacgcacacacacacatcccacaaccgatgcctcacagatatcctagagctattcctcagcctagtttgggaggaggggttgtccagttccaggggggagagtgaggcggaagcaggaaagagttaatggtgacccagccaaatcctggaagagaggaagtaggggaggaagtccaccccccaggcaggaattcctgaaattggcgggcgggctgggtgcgacctgaggggcagtggggtggctccgtgaagggggcgctgggatcatggtgtcacttagagtccgcctgccccaggtcacaagcctcctgccccctaccccactcccaagcaggttcccagcccagaggaaagttccgggatgcggaggatttggaaggagagaagacagagctgaaggtgccaaaacagtgttataagagacggagagaaagagacagggcaatagagatgaagagacaggaagggagagagcaaagagatacacagagacagggagagatggagatagagtcagagacatccgcagaggtcccacaacagacgggggtgaggcagaggcaggggcagagggaggtgggacccagaaacagagagacagagacagacagacggagacagagaggcagagatcaagaaaaagacagagacatccagagacacagaaggaaagacacgtccagaggcagagggaccacagacacagagacatcaggcgggagttggagacagacgcaaagccagggagagcaacagagggggcgggcaccgagacggcgcgggagactgaggcagcccccgagggggcggggaggagcggtctcgccacgagcagggcaacctagtgagaccccgcagcatcgcgggcagccggggaggacccggcacttacctgcgcgcggcgactggacggggcgggcggcggcacctctctccgctgcgtccaggtccccggtcttgacaacggcgcggggacccagcggatgcccccgcggggcagaacagcggctactcctcccggcccccgggccagagccgccagccgaggccccgccccggccaggcccgcccccattaaccccacctttgccgctgccccttaacccctttcaggcttcaccccattaaacgcctccagccacgggtgaggctcatctgctactggaacacccccgaatccttccaagtccccagctggaaggtcccctctctccaaccacacacccccaaatttatcaggtcctcggctatgggaagaggaggcccccgctactgaccttccctgggttaagccatttcctcccttagagaccccaggcttcagtcattcatcctctggtcattaaccttctgcatcttcctccccaacaacggagagaataaagggttctgttaggtccccaactccaaagtcagggccacccctagaaggagctctggggttgcatttccagcctgactcttggtcagaccttaggctagtgacatctccgtgcctcagtttcctctttgaatcaaggtggtcactcatggtgcctgcttgcttccttcttttctttgctttgctttgctttgcttttttctttcttttctttcgagacagagtcatgctctgttgcccagactggagtgcagtggcacaatcttggctcactgcaatctctgccttccaggttcaagcgattctcctgcctcagcctcccgagtagctgggattacaggcacacaccaccacgcccggctaatttttgtatttttaatagagacggggtttcaccaagttggccaggctggtctcgaactcctaagctccagctatctgcccacctcggcctccaaaaagtgttgggattacaggcgtgagccaccgtgccccaccttttttctttttttgagacaggttttcactctcttgcccagtctggagttcagtggcacgatcatggctccctgcggcctcaaccttccaggctcaagtgatcctcccacctcagcctcctgagttgctgggactacaggcgtgtgccaccacacctggccaatttaaaaaattttttttttctatagacaggggtctcactatgttgtctaggctggtctcaaactcctgggctcaagccatccttctgctttggcctcccaaagtgctgggattataagcctgagccaccgaggccggccatcatggtccttttctcctggcggtctcatttaatggtgtcaatgctatcaagtctgtaaaatatgccaaccagaccccaacactccccatctttctctgcctcacttttcccctaccctttggggaaggcaacattctcttatttttttctagttgtctgccttcctactaggaagagtgtcatttttgtgtctggcttgtttactgttgcatgtctgttgcctagaagactgctgggcaggtgataggtgtgaaacacattgttttctggccgagcgtggtggctcacgcctgtaatcccagcactttgggaggctgaggcaggcggatcacgaggtcaggagatggagaccatcctggctaacacagtgaaaccccatctctactaaaaatacaaaaaaattagccagatgtgatggtgggcgcctgttgtcccagctaatcaggaggctgaggcaggagaacggcatgaacccgggaggcggagcttgcagtgagccaagaccgcgccactgcactccagcctgggtgacagagcaagactccatctcaaaacaaaaaacaaaaaacattgttttcagggagtgaacaaatgaatgataagtgctcctaaaacattagcttatttttattattaacatcacatctttcataaactaatcatgagaattcattattggtcaagggacttcagatagatgtggcatataacactaaaaaatgatagctgtcaggtttgatttttttttttttttttgagacagagtcttgctgtgcccaggctggagtgcagggacatgatctcagctcaatacaacctcctcctgccgggtacaagcaattctcctgtctcagcctctggtagctgggtatacaggcatgcaccaccacacccagctaatttttttgtttttagtagagacagggtttcaccatgttggccaggctggtctcgaactcctgacctcaggtcatctgcctgccacggcctcccaaagtgctgggattacaggcatgagccacggcacctggcttgttttttgtttttttgagacagagtcttgctctgtcccccaggctggagtgccattgtgccatctcagttaactgcaacctccacctcccaggttcaagtgattatcctgcctcagcctcccgagtagctgggactacaggtgaacaccaccacacccggctactttttgtgtttttagtagagacaggttttcaccatgttggccaggctggtctcgaactcctgacctcaggtgatcagcctgcctaggtctcccaaagtgctgggattataggcatcagccatcgcgcccagctcttttgtgtttatttttaaattaaattaaaatgtaggccaggcatggtggttcatgcctgtaatcccatcactttaggaggccaaggcaggttgatcaattgaagccaggagtttgagatcaacctgggcaacatagcaagactctgtctctacaaaaaaaaaatttcttttaactagccagctgggtggtgcgtgcctgtggtcccagctactgcgcaggccaaggtgggaggatcacctgaacccaggaggcggaggttgcagtgcgccaagatcgcaccactgcactacagcctgggaaacagagggggaagaaagggcacctaagctctgtggctcatgcctgtaatcccagcactttgggaggctgaggcgggaggatcactcgagcccaggagtttgagaccagcctggacaaaaaagtgagacccccatctctacaaaaaaaaataaaaaataaaaattagccgtgattaaaaaataaatgtaattaaaaattacatttaattaacaattagtctcaaaaaatttgattaaaatgttcagatcttaagggaagaatataaggaatcctgaaaattggatacaccatgtaattaaacacccaaatcaagactcaggatatcggccaggtgcggtgtctcacacctgtaatcccagcactttgggaggctgaggtgggcagatcacttgaggtgaggagttcaagaccagactggccaacatggcgaaatcccgtctctactaaaaatacaaaaattagttgggtgtgatggtggatgtctgtaatcccagctactcggaaggctgaggcaggataattgcttgaacccaggaggtggaggttgcagtgagccgagattgcgccattgcactctagcctgggcgacagagcaagactccatctcaaaaaataaataaatagtgcaggtgcactggatcatgcctgtaatcccaacactttgggaggccaaggcaggcggatcacctgaggtcaagagttcaagactagcctgaccaacatgaagaaaccctgtctctactaaaaatacaaaattagccgggcgtggtgacacatgcctgtaaacacagctactcgggaggctgaggcagaagaatcacttgaacccaggaggtggaggttgcagtgacccaagatcgtgccattgcactctagtctgggcaacaagagcgaaactctgtctcaaaaataaataaattaattaattaataaaacaaacaaaaacatagctattcttataatcttgtgtggctttggacaggtgactttacctctgtgaaccacattacccccttcctctcagggatttttcttttaagagatggggtctcactcttttgtccaggctggagtacagtggctccatcataactcactgcagcctctacctctggggctcaagcaatcctcccgcctcagcctcccaaagcactgagattaccagagccaccaaacccagccaaagtgagcaggttaacgaagactcaagagaccaacaacactcataggaataaatgtttttttttttttttttttttttttttgagacagagtctcgctctgtcgccctggctggagtgcaatggtgcgatcttggctcactgcaagctccgcctcccaggttcacgccattctcctgcctcagcctcccgagtagctgggactacaggcgcccgccaccgcgcccagctaattttttgtattttttagtagagacagggtttcactgtgttctagatctcctgacctcgtaatccgctctcctcggcctcccaaagggctgggattacaggcgtgagccaccacgccaggccaggaataaatgtttttttccttcaggccgggcacagtggctcacgcctgtaatcccagccctttgggaggccgaggcaggtggattgcttgaggccaggagttcaagaccagcctggccaacatggcaaaaccccatctctactaaaaatacaaaaattagctgggcatggtagcgcacacctgcagccctagctactcgagaggctaagacatgagaatcgcttgagcctggcaggcagaggttgcagtgagctgggattgtgccactgcactccagcctgggcaacacagtgagactgactcaaaaactaataataataaaaagataaattctgaatgctcattggtgggcttagagtccccttctctctctggctcatcctaaatttatgctgagactcgatcagggtcctggagggaagcaagtggccactccgagtttaactgggagcatttatgggcagtttatagagggatgggcagagtggagaaagccacaaaggatggggcggccccaggggaccatccgaagtgggcacgaagccatcgccagcctagggcagaagggacagggagggagtctgttacccgtctccagggacagctcgagttcccagaggaactgcggctcagaggaggggaaccacagccactgtgagtgcgggatgcagggaggggcccaggaagcaaataccctgacctctctccaccgaccctgccgatagaatttgcacacggcggtctcccagggccccgagctggggaaggaaggctgagagtgaccctgggggcgcggaggagggtcacgtggagaatcaccagcacttttccagcagaactttcttggcacatttttccatgcaggtccaagactggccacgaggggtcgaaagagcacccggatgcccgatgaaagggccgcttccgcagcgctgggccactttcccagaacctgggcaatggggaagggacaaaaggtggggagtgaggggaggaggagaggaggctttgacccaagagcggcagaaaactgtcttctagacctaagggtgataggataggcctagtgcaaactccatccacagggtcggtggagagagtcagggtacactcacttcctgggcccctttctgcttcccttagtcccacagtggctgtggccccctcctctgaaccacagctcctctgggaactctgcctgtccctggagacgggtaacaaattccctccctgtcccttctgccctaagggtggtgatggcttgggtctcactggtctcctatctccagcataggtctggtcactgctggctgatgaggagttcgcccgtggacaagttcagaaagggagggttcaaatggctggcacctaagacaatgtgactgtagagggtgctggcttttaaaaaagtgaaggatcagccccggtgtggtggctcatgcctgtattcccagcactctgggaggctgaggcaggcagatcacctgaggtcaggagttcgagaccaacctggccaacatggcgaaactctttattaaaaaatacaggctgggcgcagtgggtcatgcttgtaatcccaacactttgggaggctgaggcgggcggatcacgaggtcaggagactgagaccattctacctaacacagtgaaaccccatctaaaaataccaaaaaaattagccgggcatggtggcaggtgcctgtagtctgagctactcgagaggctgaggcaggagaatggcatgaacccaggaggcggacctttcagtgagccgagatcgcaccagtgcactccagcctgggcgacagagtgagactccgtctaaaaaagaaaaaagaaaaaaaaatgcaaaaagtagccaggtgttgtggcatgcacctgcattcccagctactcaggaggctgaggcaggagaatcgcttaaacccgggaggcagaggtggcagtgaaccaagatcatggcactgcacccagcctgggcgacagagcgagacaccatctcaaataaaaaaaaaattttattttaatttttttgagacagagtctcactctgtcacccagactggagtgcagtggtatgatctcggctcactgcaacctctgcctcccaggttcaagccattctcctgcctcagcctcctgagtagctgggattacaggtgcccgccaccacacccggataattttttttgtattttttagtagggacagggtttcaccatgttggccaggctggtcttgaactcctaacttcaggtgatcaacctgcatcggcttcccagagtgctaggattacagatgtgagccaccgcacccagccagaaagttttattttaatctaagttagagcaagatggtttctgttgcttgcatccaatgaagacctaagtaacaatggtccctcatcataagcactgtgacacactgatctggtttggctgggtccccacccaaatctcatcttgaattcccaggcgttgtgggagggaactggtgggaggtaattaaatcacggggcaggtctttcccatgctgttcttgatagcgaatgagtctcacaagatctgatggttttcaaaagtggcgtttctctgcacaagctctcttctcttgtctgccaccatgtaagatgtgcctttcatcgtccaccatgattgtgaggcctccccagccacatggaaccataagtccaatagacctcttttttttttgtaaattgcccagtctcaggtatgtctttatcagcagcatgaaaacgggctaatacactaatacacacacacatccatacacatacacaactgtgtaggcacataccgtacaaatacatagaccctgacacaccttagtgtacgtgtctttatttctggatgatataaaagaaaaaacttaaaaaacaccccaaaccaaacaccaatggatccccaaagcgatgtgactccctcttcccacccggataaatagagacttctgtatgtcagtctaccctcccgcccccataaccccctctgctatagacatactctgggtatatattactctactcggcaatagacatctcccgaaaatagaattcctgccctgacacctgactcttccctggccgcatcagaccacccgccactgtagcacactggtgtccttgccccctgtggtcagggccatgctgtcatcccacaagaaggccacatttgtcacatggctgctgtgtccaccgtacttgtggctgagggcctgttacaaggaaagaagtaagtgaagaaatgtcagtggggacaatgccaccccatcatggtcctcttgtcttgacccggttcttttctgctcttcctctttttttttttttttaatcacttagagtgaagtcacttaggtatgagcacagcttcaatgcagccttgacctcctgggctgaagggatcctcccacctcagtctcccaagaagtagctgggatcacagatatgcgcccccacacctggctaattctttttccttttatagcaatggggtgtcccagtgttaccagggctaataagccctttgtttaagaaccaacagaggccaggcgtggtggctcacgcctgtaatcccagcactttgggaggccgaggcaggcggatcacaaggtcaggagatcaagaccatcctggccaatatggtgaaaccccgttctctactaaaaatataaaaattagctgggtgtggtggcgcatgcccgtaatccgagctacttcggaggctgaggcaggagaatcacttgaaccagggagtcggaggttgcagtgagccaagattgtgccactgcactccagcctggtgacagagtgagactctgtctcaaacaaaaaagaaccaacagaacagctgggcatggtggctcacgcctgtaatcccagcactttgggaggccgaggtgggggtggatcacttgaggtcaggagttcaagactagcctggccaacgtggtgaaaccccgtctctactaaaaatacaaaattaggcctggcgtggtggctcatgcttataatcccagcactttgggaggccaagttggggagatcacttgaggtcaggagttcgataccagcctggccaacgtggtaaaaccctgtctctactaaaaatacaaaaaaattagccgggcgtggtggcacacgcctgtagtcccagctatttgggaggctgaggcatgagaatcacttgaacccaggcagcggaggttgcagtgagccgagatcgtgccactgcactccagcccgggcgatagagggagactctgtcaaaaaaacaaaaacaaacaaaaaacccagcagggcaactgaattggtttattcagcaagttaatggcataaatagaagaaatagcatgcacgtggggaaggctattctacatgctgggatttgagacataagcaaatgtagtttggaccctggttcaaacaaaccaaccatagaaggccagtctggggcacatcagggaaatatgaatatgtactggctatgagatcatatttaggaattaacgttttgtttttgccttcctagggatgaggcatgtaagaaattaatgttgctgggcgtggtggctcacgcctataatcccagcactttgggaggccgaggcaggcagatcgcctgaggttgggggttcaagaccagcctgaccaatatggagaaaccctgtctctatttgaaaaatacaaaattagccgggcatggtggtgcatgcctgtaatcccagctactcaggaggctgagtcaggagaatcgcttgaacccaggaggcggaggttgcagtgagccaagatcgcgccattgcactgcagcctgggcaacaagagtgaaactctgtctcaaaaaaaaaaaagaagaagaaattaatgttaattaggagtggtcagaggcttgtggatatgtaacaattcttcttcttcttcttcttcttttgagacagaatctcgctcttttgcccaggctggagtgcagtggtgcaatctcaactcactgcaacctccgcctcccaagttcaagtgatcctcctgcctcagcctcctgagtagttgggatcacaggtgcccgccaccacccatgactaatttttttgcatttttagtaaagacggggtttcaccatgttggccaggctagtctcgaactgttgacctcaggtgatccgcctgcctcggcctcccaaagtgctgggattacaggcgtgagccaccgggcctggccagaattatccttatttttttaggcatgaatgctcaatttagagggctaaaagataacctatgcgttttcgtgtgtgtgggtttttttgtttttgtttttgttttatgacggagccttgctgtcgctcaggctggagtaaagtggcacgatctccgctcactacagcctctgcctcccgggttcaggcaattctcccgcctcaccttccccagtagctgggattacaggcgtgcaccaccaggcttggctaatttttgtatttttgtattcttttttttttttgagacaaagtctcactctatcgctcagtgcattgttgcttagtggagtgcagtggcgtgatcttggctcactgcaacctctacttcttgggttcaagcaattctcctgcctcagcctcctgtgtagctgggattacaggcgcctgccactacgccttgctaacttttgtatttttagtagagtcagggtttcaccatgttggtcaggctggtctcaaactcctgacctcaggtgatccatcaccttggtctcccaaaatgctgggattacaggcttgagccaccgcacccggccacatatgcagtttcttaaaactacagaccaggacaggtactgtggctcatgccttgtaatcccagcactttgggaaactaaggtggagaggattgctcaagcccaggagatcaagaccagcctgggcaacagagaacctatctctatgaaaaatacaaaaattggccaggtgtggtggtgcacgcctgtagtcccagctactcagaaggctgaggtgggcggaccgcttgagtccaggaggtcaaggctgcagtgagccgagattgtgccatgccactgcactccagcgtgggcaacagagtgagaccctgtctcaaaaataaaaaataaaaaaagaagagaaaggagaaagaagaaacaaatgaaataaatataccaaatctggtaatagttgaacatgggtaacaggtacaggaggagtcactgtactagtctttctgcttttatgcatgaaaatttcctaggaaaatgctgaaacaatccctcttctgttagaaccagagaatggtaaaattaacgtccagcttttttttttgtttttgtctttgttttgagacaaagtcttgctctgtcgcccaggctagagtacagtggtgcaatcatggctcactgcagcctcaacctcctgggctcaagcaatcctcccacctcagacttccttgtagctggaactacaggcatgcacaaccatgcccagctaattttgtgtgtattttgtagagatggggtctcactttgttgcccaggctggtcttgaactcctggcctcaagcaatcctcctgcctcagctttgcaaagtgttgcgattacaggtgtgagccactgcaactggccttggcctcccttaaaaactcataagatctggttgtatatcctgtgcctaggtacatagtaggtgctcaataaatatttactgagttaacaaggataaaagaaccaaagagctcagaattgcagttgctcagaacttcagagaaccaggtcttcaccatgacacactgaaattcatccaccttggggttaagaaaggcccttgggatcaagactactgtcctccttgtacagatggggaaaccgaggctcagagaaggggtggggttggaccagagctgcctgaattttgtccccacccctgcttgctacccccgtccatccccatctccccaagggactcactcgaggctgacagcaggggtagctaaacaggtgaactttgccaaagtcatcagctgaagccagcaacttcccatcatgagagcgggccacagcgttgatatcagtgccgtccgccccctcagaccagatccctgtgggcaagatgaagggaagtggtaagatgtcagctggagccagggaccgccaagaggagcagattgccactccagccaccttaatttgttccgacctagcctgtatctatccgaggatatgagtcagaattaccttaaaatgtgaatccgagcctgcccctgctctgcttaaaacccttccatggctccctggtgatcttagaagaaagcctgtggttctaaggctcagcaggccccatgcactgctccagcctcatccctcatcagtgctcctgttaaactctgtaatgatttggccaccctgcctccctgcatttctccaaatgccaagttctgtgtcacgcgtgggcttttgtatgtactattccctttgccaagagactgctttccttcttcactgccctggaaagtaactcctcatcctccaggtcctagctcagatgtctcttcctccaggaagccctccctgattccctccaagagtaggccagatgccccaccctgggtttccctgtctcagacctgctcactctgggtcatcactgtctggggacaagtctgcctcccccactggactgagagccacaggagagcagggccgtcagtcatggtcactgccaagcccacggcaggcacagaactgctcagggaatatgtgtttgcttcattcgtgcctgaatgaatgggtggctagggcaccggcagtgtggatctctcctggccagttaccacgcccatttggtttcattttattacagctctaatgagtcatctcaccctaccctttcctcttacacaaatacagcccacatgcagtaaagcagtgagcttcccacactggaggtaagcagtaagactctggaaaccaccagcggggatgtctctcagaactactgtcctcagtgagacctctctcattccagaactcaccaaacaccccaaaccctaggacacaagtagctgtggcccattccatgttcctcacagcatccgcactggtgatctgcttacaggtagccgggtcccctggggcagaaaatgggaggagacattcagagttggaagaactacccagtaaacccatccctttcttagacaatcggagctgaggtccaagacagaggaggctaaggtcccagggctcattctacctgtcaggactggctgagaaggcatcacatgctggggtcttcacagcccgcagcgtaagcaggagcatctacttttaaacccgcatctggccgggcatggtggctcacgtctgtaatcccaggaggcagcatgagccacagcatctggctggatcacctgaggtcaggagttcgagaccagcctggccaagatggtgaaaccccatctctactaaaaatacaaaaattagaccaggtgtggtggctcatgcctgtaatcccagcattttgggaagccaaggcaggcggatcacctgaggtcaggagtttaagaccaacctggtcaacatggcgaaaccctgtctctactaacaatattttaaaaattagctgggcgtggtggtggacacctggaatcccagctactcaggagcctgaggcaagagaatcgcttgaacctgggaggcggaggctgcagtgagccgacatcgtgccattgcactccagcctaggagacaagagggaaactcccatctcaaaaaaaaaaaaatacaaatacaaatattagccgggcatggtggtgtgctcctgtaatcccagctactcaggaggctgaggcagaagaatcacttgaacctgggaggcggagcttgcagtgagccgagatcgcgccactgcactccagcctgggggacagagcaagactccgtctcaaaataataataataataataataataataataataattaaaaatttaaaaatgtaaaaaaagaaacctgcatcctacccatccgaccggaaaggggaggagttgactaaaagtggggtataccagggagaaaatgagaagccagcggtccctaaattccaaatcagaaccagccttgaataccaagggagcgaggcttgaagcccctccctcccctcccagaactcagggaagtctgcaaatgagacggaggaagtaatgtctctgggtcccggagaactcacagtacagaatctcatagtccccggagttggtgacaaagcagctgctgtcctgggcccaatccaggtgggtgataaaactggaatggccctgcgggggagggaagggatggtgttagagctgcagagggcggaaccaaggagagggggacaggattaaatcaggaaagtggaagtcaaatacagaggtagggcgagaacacaaggggactaaaggaaggatacacaggcctttggagtatgggggcagggccagaatactgtgggcggggccagactgtgatgggcagggctagacaaaaagcacttagaacacaatgggagtttagaacaggtgggcagggctagacacggaggagctggctttgaatgttgaggggcggggctacacagaggggcggtctcggaacgtgaggggcggtctcggaacgtgaggggcggggctacacagatgggcttagcacgtgggggcggggctacacaaaggggcgggcttagaacacacgaggtggtgaatgtgtggacgtggccaagactccttgctctgatcagggcagaatcagttgagtgttgaagctgcgctcccttgaggtagaaaattggttaattttgcaccccctgggcggggtggcggcgcgggctgggggccactgcccactcaccgagcacttgcccaggcggctgaccttgcggccgccctggtccaccgtgtacacgtacaccaagttgtcgtgggagcccacggccaggtacgccccgtctgggggagggggaggggggctatgaggaggcacccaggctccatcccctcctcgcccagactcagccccctcaacagtccccagctccatccccactgcatccctcctaggcctcgcttcgcaggctccacccctccccctgccaagagctctgagcctctgtcccctggccctgccgcttgggtgtcccaggcctgccgcttacctggggagaagctgaccactgagatctgttcattgccgtctgtgtggatagccaccaggtcatgggtctccgtgtccagcagcagccatcttgaaggagagggcgtggtggggggaggaggggtgagctgatctgacagagagaggccgcaatctgtggggtctaagggagggatcagagggaccccagaagtgacctgggctgggcacggtggctcaggcctataatcccagcacgctgggaggccgaggcgggtggatcacttgaggtcaagagttcgaaatcagcctggtcaacatagcaaaaccccgtctctactaaaaatacaaaaattagccaggcgtggtggcacgtgcctgtaatcccagctacttaggaggctgaggcacgagaattgcttgaacccgggaggcagaggttgcagtgagctgagatcgcgccaccggactccagtctgggcgacagagcaagactctgtccccccaaaaaacaaaacaaaacaaggccaggtacagtggcggtggctcacgcctgtaatcctagcactttgagaggctgaggcaggtgaatcacttgaggtcaggagttcgagaccagcctggccaacatggtgaaaccccgtctctactaaaaataaaaaaaaattagccaggcatagtggtgggcgcctgtaatcccagctactcgggaggctgaggcaggcaaatcgcttgaacctgggaggcagaggctgcagtgagccagaggaatattgagggatcagggctcggtaaatagtgggatttgggaaagtaggaaagagggaagaagggccagttccccagggagcagagaaggcctcccgaaatgctctcctcagctttacctgccagtcactgtacccacagccaggacagagccactggggtggaagccggctgagcgggcagggtcctgagaagggagagagaagaggcagggctcagagctggggtcccatgtccatctggacattctcttgcctcagggccaagtctaatctttgcatgagggctctcccctccctctgctgccctttgggacacccccaccccagacaccatggcagccattcctctttacatttctgtagcatgttaacctgaacagaaaccattcctcctgtcactcctgtcccgggatccctccttactcctcttctaaattcccacagctttattcatccaagacgacttctttagataatttcctagatgtgggaatgctgggacaaagggcatctagaattttaagactttatttttgttttttattttttaaatttttatttatttttttgagatggagtttcactctgttgcccaggctggagtgcagtggcacggtctcagctcactacaacctccgcctcctgggttcaagcgattctcctggctcagcctcccaagtagctgacattacaggcgcccaccaccacgcccggctaatttttgttttttttttttcattttttgtaaagatggggttttgccatgttgcccaggctggtctcaaactcctggattcacacaatctacctgcctcagcctcccaagtgctgggattacaggtgtcagccaccacacccagctgaaatttttattctgtttacattttaattaattgtgaatagccatgtgtggccagtggttaccctatgggacagtgtagctctacacttgactgttgcagcggtcacaccttccttgaactcagcggctcctgactcccccctcctcatggcggcacccctgacaggatggttcggtgtcgtcctgggctcccttccagtcaagaacctactcctccaacccttctgagagagcttctaagcacccagttccctagatgaaacccccaccctgcttaaaaagaccttgtttgggccaggcttggtggctggcatctgtaatcccagcactttgagaggccgaggcgggcggatcacgaggtcaggagttcgagaccagcctgaccaacatggtgaaaccctgtctctattaaagatacataaattagctggacatggtggtgtgcacctgtaatcccagctactcgggaggctgaggcagaagaatcacttgaacccgggaggcggaggttgcagtgagccgagatcgtgccattgccctccagcctgggtgacagagcgagactccacctcgaagaaaaaaaaaaaaagaccttgtttggtttcagtctaatgtgctgagccctgacacagggggaaaggtagttctgttagaatggtgcttttccagtccccgggccccttacctcgatgatcctgctccacaggggctggtgggaatctgagctccatagatgcaccagcttatcctgcccgcaggtcacaaactgggcccgactggggtgtgtggccaggccccacagctcttccacatggccctggtggaaagggaggacagcaggatggagacagcagccctggccttttcccactcaacactaatgccagacaaatgctagatgagccccagcaactcaccctgccccagcgggacccagggaagacctttcccagtatgtctgaagggggcctcaattgggcatctgaacccatgccctggtgtgtgactcaaggcaaatcctgccccttctccagggacctctgctttcttctttgcacaatgggaggcaggagggcatggtggctcagagcttgatctcaggggtcagacaggctgcaccctggccacacacctcccaggtctccagctccaaggatctgggaaggcgcttctggagtctgcctgcatccagacagagcccagaagtctgagggacctcatggagggcactaaacctgatggctctgaccttcggctttctattactgaccgagcgcagtcatctaggcaggtgacatctccttgggacctcagtttgatcgcctgtaaaatggggccaattggtatgtatgcctcatagcattcctgtgctcactcaaatcatggatggaaaatgctggccaggtgcggtggctcacgccggtaatcccgacactttgggaggctgaggcaggaagattgagctcaggagtccgagaccagcctgggcaacatggcaaaaccccatctctacaaaaaatacaaaaatttgccagttgtggtggtgcacacttgtagccccagctacttgggaggctgaggcaggaggatcccttgagcccaggagacggaggttgcagtgagctgaaatggcatcactgcattccaggctgggtgatataataaataaataaaatgctaaacatgaggataattcagagaatgtggtcacaaaatggaaatgtctaactattaatatttataacaaattttttttttagacggaatctcactctgtcatccaggctggagtgcagtggtaggatctcagctcactgcaacctctgcctcccaggttcaagcaattctcctgcctcagccttttgagtaactgggattacaggcacacgccaccatgcccagctaatgttttgtatttttagtacagatggtgtttcaccatgttgcccaggctggtcttgactcctgatgtcaagtgatctgcctgcctcggcctcccaaagtaatattaatattatgattaataattataatagccaatataatagtatgggctgggtgcagtggttcatgcctgtaatccccgcattttgggaggctgaggtgggtggatcacttgaggtcaggagtttgagaccagcctgaccaaaatggtgaaaacccatttctactaaaaatacaaaaattagctgggtgtagtggtacatgcctataattccagctactcgggaggctgaggcaggagaatcacttgaagcgggaggcagagtttgcaatgagccgagattgagccactgcgctgcagcctgggcaacagagcgagactctgtctcaaaaatgaaaaaaaaaaaaaaaaagtataaatatagtgcttcccggtaggtgagttctttaattgggtcaggggtaaggaagggagggaggaggccaggaagggaggagcaggcgtttgagcttcgagaagaaatgcaagcagactccagcaggaccttccccaatccgtggagctggagtctgagaggtgtgtggccagggtgtctgcagctgtgggacaacctgtagggacactcaccaacctgaagggtgccacccccaatcagagtggcaggaggcagcacagttggagcaggggcctggggcccctctgctgtgcttggagttaaactcttggttgctggatcctgggaaggggtcctgggtcagggccaggtcagagaagggacagagcagggaggtgaggagaactgggagtggggagggggagtggatgatgcagggaaggccagggaaagagctgggaagaggggaggggtgcagaggagagaggcgcacctggaccagcagtgagaagcctgtgtgcacggagccctgcaggatggaattgcgggtggtccccacgtacagtgtgtctccgtggccctctgccacggtgcgcacagggccaaagtcctcagggacctgggtggacagataagagggaagatgagtaggatgcacacgggtgggtgtggggtgacatactgtggggaggagggtctggcgttgggagccctggtgagatcggggggggcctctctacccccatctgagcccactgcccctcctcacctccacttcctgcagcttgctgtagtcagaaccccagaggaccacccgccgatcacggccccctccagacaccagcgtcccgtcccgcagggcgcagagcccaaacacgccgccgtcgtgggcgcccagcaccgcctgtgtgatacggttcccacctgcagggtggccaggggcagggtcaacagggagaagccacccctatgctgacccctgaaagcatcttgaactctcaagcctatgtccatccattctcacccacttttccaccttttttttttttttgagacggagtctctctgttgcccaggctggagtgcactggtgctatctcggcccacttcagcctctgcctcttgggttcaagtgactctcctacctcagcctcccaagtagctgggattacaggcgcccaccaccatgcctggcgaattttttgtttctcgtagagatgggtttcaccatgttggccaggctggtctcgaactcctgacctcaagtgatccacccgccttggcctccctaagtgctgggattacaggcatgagccaccatgcccggccccacctttcgacctttctatctgctcttccacccacccaaccacccaagcacctgccacctacccactcaaatacaataccttatcatctattcattaaaccatctgcactaacatctacccatccacccatctaccctttgacccatacacccacccatccatccatccactcacttatctactggtctgttagatgaacactatcgactcatccattcatcacccatccatccaccagactatctatccatccatcaccctagccattcatccacccatctctctactgatccatccagtcagccaccctgccatccatccatcaacccacctctcatccattcatttgccctctctcgttttgttttgctttgttttgttttgttttgttttattttgtttttgagacaaagtcttgctctgtcgaccaggctggagtgcagtggtatgatcttggctcactgcaacctctgcctcctgggtttaagcgattctcatgtctcagcctctggagtagctgggattacaggcatgtgccaccacacctggctaatttttgtatttttagtagagacagggtttcactatgttggccgggctggtctcgaactctttgactcaagtgatctgcctgcttcagcctcccaaagtgccaagattacaggtgtgagccatggcacccaatctaataaagacaattttttaaaaagagagggcaggcggccgggttcggtggctcatgcctgtaatcccagcactttgggaggccgaagggggcggatcacgaggtcaggagattgagaccatcctggctaacatggtgaaaccccatctctactaaaaaaatacaaaaaattagccgggagtggtgatgggcacctgtagtcccagctacttgggaggctgaggcaagagaatggtgaacctgggaggtggaacttgcagtgagctgagattgcgccactgcaccccagcatgggcgacagagcgagactccgtctcaaaaaaaaaaaaaagagagagagcgcaggctggccgagtgcggtggctgatgccgataatcgcagcactttgggaggccgaggtgggcggatcacgaggtcaggagatggagaccatcctggctaacacggtgaaaccccgtctctactaaaaatacaaaaaattagccgggtgtggtggcgggcacctgtagtcccagctacttgggaggctgaggcaggagaatggcgtgaacccaggaggcagagcttgcagtgagccgagatcacttgagctcaagtgttcgagggcagcctgggcaacatagcgagacctcatctctacaacaaatacaaaaattacctgggcctggtggtgggcacctgtagtcccaggtacttgggaggcaggaggatcacttgatactgggaggcagaggttgcagtgagctgtgatggcaaccactgcactccagcctgggcgctagagtgagaccctgtcttaaaaaaaaattctttattaaaaaaaaatttttttttttttgagacagagtcttgctctgtcccctaggctggagtgcagtggtgccatctctggtcactgcaatctccacctccagggttcaagtgattctcccacctcagcctcccgactagctgggattacaggtgctcgccaccatgccaggctaatttttgtatttttagtagagatggggttttgctatgttggccaggctggtcttaaactcctgacctcatgtgatctgcctgcctcggcttcccaaagtgctgggattacaggcgtgagccaccgcacccagcctaaaaacttttaaaagtaaagatgaggtctcactatgttgccctggctggtctcaaactcctgggctcaaccagtcctcctgcctcagcccctcaaagtgctaggattacaggcatgagccactgtcccagcctcaacccattagtttgttaataaagtcatccattggttggagcaagtatttcttcacccaaccattggctaagacaagtcatttattcatccaatcactgattaacttcttggaacaatctgttcttcataacacattaatctgttggctgaaacaaccattcattcattcactcactcattcactcattcattcattgctgtatagatccactgcctgagacaaaacctattcactaacatagttagccattagtggtaacaaccactcatttgttcctttacccagtcactctccctttaaggaggatgacacattcatttacttattcttccatccatttcctaggatcacaccttcattcattccttcattcacttattcattgatccacacgctgggacaaagcacttgtccatgtatccattcatctacccatccgtccttccttccatccacccatccatccattcatcatctaaacacaactgagctaacccattcattgataatctggacttgatccctaacaagggatttccagagggcaaggcaggggggagtcaataaagatttcctggagatagggatacttgagctgaaccttgacgagggtgttggaatcggacatccatttacactcatttcacacaagcagaattccacgaagggaggcagagccaggagtgtttcagaagactggattgggaaccaaacagatggggtgacactgacctttgccccaaacatagaggttccccccagagtcccccgtgaccacgtcgccaccttccaaaaaggtcacacacagcacatacttcggtttctcatgtttctaaggtgggggaggaaaggaaggtgtcagagcgtcactgaagcaggtagcctcccagaggtcatctgtcacccaggaccgtggccaggcaatcccctctatctatgcgtttagggtaaggctctgcgtggagcatcccttctcccacctgcctccatccggcctgcagtgcttcggtggcctagaggttctgaccacaattgtcttgctttcctacccctgggcccacttcctgccctctctctggtccccctgactctttcttttgagatacagtctcacctgtcatctagaccggagtgcagtggcatgtctcggctcacagcaacctccccctcccgggttcaaacgattctcctgcctcagcctcccaagcagctgggattacaggcctgcgccatcatggccggctaattttgttttgtttttgtttttgtttttcagacggagtctcgctctgtcaccaggctggagtgcagtggcgtgatctcggctcactgcaacctccacctcccgggttcaagcgattctcccgctgcagcctcccaagtagctgggattacaggcgcccaccatcacgcctggctaattttcatatttttttagtagagatggggttttgccatgttggccaggcgggtctgaactcctggcctcaagtgatccacccgcctcggcctcccaaagtgctgggattacaggcgtgagccaccgcacccagcctggtccccctgacttctcccctcctgtcggcgcctcattcatcctgtctctcctcctccctcctcacctccagtctgtctctctaggtcccattccctgcctcactccaccttctcagtgtctctgtttcatctccgtgcccagtgttctctgggcttcccttttggggtggaagccccatctctcaccaaaggcaatgagccctatgggaggaagccctgtgtcttcccaccctctgcttcccactcaacttgtggctctctcagccaggcagcctctgagttctctgattatccatcatatcgacaaccgcagcacccctgtttttgtttttgtttttgtttttgttttttttgagacaggatctcactctgtcacccaggctggagtgcagtggtaccatcatggctcattgcagtcaacctcctgggctcaagcggtcctcccacgtcagcctcccaggtagctgggattacaggtgcgcaccaccatgcctggctaatttttgtattttttgtagatatgaggtctctccatgtttcccaggctggtctcgaacttctgggctcaagggatcctcccacctcagcctcccaggtaactgggattacaggtgcacaccaccatgcccagctaatttttgtattttttgtagatatgaggtctcaccatgttccccaggctggtctcgaactcctgggctcaagggatcctcccccctcagcctcccaaaatgctgggattacaggcgagagccaccttgccacagtacccatttattgaccatttactatctgctaggaactgctgtactcttcatccctttgaatcctcacaactttttttttttttttttttttttttttctgagatagggtctcgttctatcacccaggctggagtgatcatttgatcacggctcactgcagccatgagctcaggtgatccttccacctcatggtgcccggtcaccctcttaactccagagttaaggtggatcatcaccatggtatggagaaagaaactgaggccccagcaggcaacatctcagcgtccctgtaatcccaaacccctgccaccctctgggggatcttgctacctccctgcctgtccctaactacctctctcagggccagcctgtcccccaaacccctggcactcacctcaaagaggccttgccgcttgctcaagctgcccccctccaaggtccagaagtagatgtgagatttcccgcaggtgataagcacagtggggtccgtggggtggaaggtggccaccaatacagcctcattggagcactttggggggtgggggagattctgaatgaggacctcaaagtccccaaggctactatacccgcccctcacaggactgccctaaacggctgtttgtgttgtatgctgcacacctgaacttttcttttttttttttttttcagggcagagtctcaccctgtcacccagactggagtgcagtggtgcaatctctgctcactgcaacctccgcctcctgggttcaagcgattctcttgcctcagcctcccgaatagctggtattacaggcaggtgctaccacacccagctaatttttgtattcttagtagagacaggatttcaccatgtttcccggctggtctcgaactctttacctcgtgatccacccgcctcagcctcctaaagtgctgggattacaggcgtgagccactgcgcccggcctttttttttttttttttgaatatgagtctcgctctgttgcccaggctggagtgcggtagcacaatcttggctcctacaacctctgcctcccaggttcaagagattcttctgcctcagcctcccaaatagctagatttacagggacgtgccaccacacctggctaatttttgtatttttagtagagatagggtttcaccatgttggccaggctggtctcaaactcctgacctcaagtgatcttcccacctcagcctcctaaagtgctgggattacaggcgtgagccaccacgcctggccagtacctttcctatacggtaaattaaagtacaggaagcaggacaagccagcgaagcattatcatcttcttcatcattaacaaaacagcagacacttggagctcctctcctctgccctaagcactgtgctcaacattttacaatcattagctcctttaatcctccatctccctgtgaggtcaagaccattatgcccacctcattgcaaattaaaaagtgaggctcaggctgggcgtggtggttcacgcctgtaatcccagccctttgggaggccaaggcgggtggatcacctgaggtcgggagttcgaggccagcctaaccaacatggagaaactccgtctctactaaaaatacaaaattagctggtcgtggtggtgcatgcctgtaatcccagctactcgggaggctgaggcaggagagttgcttgcttgaacccgggaggcggaggttgcagtgagccgagatcgtgccagtgcactccagcctgggcaacaagaggaaaactccgtctcacaaaaaaagtgaggctcagagagggccgggtgtagtggctcacacctgtaatcccagcactttgggaggccgaggcaggcggatcacgaggtcaggagttcgagactggcctggtcaacgtggcgaaaccccatctctactaaagatacaaaaaaattaggcgtggtggtgcgcacctgtaatcccaactacttgggaggctgaggcaggagaatcacttgaacccaggtggtggaggttgcagtgagccgagatcatgccattacactccagcctgggtgacagggcgagactccatctcaaatagaaaaaaaaaaagtgaggctcagagagggtaaaccatttgcctaaggccacacagctaggcaagagttgtgtgtggaacccagctcacctagccctaattccagagcacagcctccgcaccatttctgtttccccaaacagtgggccttgattcaaaacccaggtttccaccaggcgcagtggctcacgcttgtgatcccagcactttgggaggcagaggcagatggatcacctgaggtcaggagttcgagaccagcctggccaacatggtgaaaccccgtctctactaaaaatacaaaaattagccgggcatggtggcacacacctgtagtctcagctactcaggaggctgagtcaggagaatcgctggaacctgggaggtggaggttgcagtgagccaagattatgccattgcactccagcctaggtgacaagaacgaaactccgtctcaaagtaagtaagtaagtaagtaagtaagtaagtaaataaataaataaatagaacaaaacccaggtttccttcccctagcccaggacaggtgtgcaacctgaggcaagtatctcttcccctcaccatgcctcatccttaaaataggccacctctcagagagggaaatcgagacaccagaggactgcagagtcagcaagcagccacctcaaacccacccttctgttgggcctggtccaccgtaccccatatctccatatcctcaccaaggccctacgaggaagatgctaccattatccccattttattttatctatttatttttttgaggcagggtctcactctgttgcccaggctggagtgtaatggtgcaatcatggctcactgcagcctcaacctaccaggttcaagcgatcctcctaccttagcctccgaagtagctgggactatgggtgcacaccacacccagttaatttttttttttaagtgccagattttctgtttgttttgttttttgtttttgagacggagtttagctcttgttgcccaggctggagtgcaatggtgtgatcttggctcaccgcaacctccgcctccgggttcaagagattctcctgcctcagcctcccgagtagctgggattacaggcatgtgctaccatgcccagctaattttgtatttttagtagagacagggtttctccatgttggtcaggctggtctcgaactcctgacctcaggtgatctgcctgcctcggcctcccaaagtgctgggattacaggcgtgagccaccgtgcccggccttttttttttttttttaagtagagataggtctccttatgttgcccaagctgatctcaaacttctgagctcaagcaatcctctcatgtcggcctcccaaggtgctagggttacaggtgtgagccaccttgcccagcctattatccccatattacagatgagaccaccaaggctctgaggtggcaagcggcttgctcaagtcacacagccagcaaggagtaaagccagggcttaaacacgggtctatctgattgcagactcctaaccactgagattgggaaagtcccacagtggcacccagcaggaggggatgagaaaagtcacctcaccttgacatccaccaccttggtctccttggcccagtcccacaccgagagcatgtgatcattggattcatccactgcacacagcaggttgcctccattctaaagaggaggagagaggagggggacagaggcaaggggagtcagggcccatcctccccccatgcccaccaaggcattcaccacacaggcctgttttaaaaccttcaggctgggcacagtaggtgggaggatcgcttgagtccaggagtttgaggccagcataggcaatatagggagaccctgtctcttaaacaaaacaaatttaaatattaaaaaaaaataaaaagccaggcgtggtggctcacacctgtaatcccagcactttgggaggccgaggcaggtggatcacgaggtcaggagttcgaggccagccttgccaacatagtgaaaccctgtctctactaaaaatacaaaaaattagccaggcgtggtggcaggtgcctgtaatcccagctactcgggaggctgaggcaggagaatcgcttgaactgggaggcagaggatgcagtgagccaagattgcgccattgcactccagcctgggtgacagtgagagactctgtctcaaaaaaaaaaaaaaaaagaccttcaaaggccctggccattttgcaggaaacacattaaaatacaccctccattagaagctgtgaagacatctgaaatggtttcatactatgccttgaaatgactcatccctaataaactcatttcatttgccctcagctattgtttctctgcagccagcacccctagccaggaattcttgctgacatcatctcatttgcatttacatatatagagaatgactgatgtaggtgaaattcagcagttaacaaagttggtattatgttgggtttttgtttgttttttattttattttattttttgagactgagtctcattctattgcccaagctggaatgcagttgcatgatcttggctcactgcaacctccacctcccaggttcaagcgattctcctgtctctgcctctcaagtagctggcacatgccaccactgccctcctaatttttgtatttttagtagagacagggtttcactatgttggccaagctggtcttgaactcctaacctctggtgatacaccagcttccaccttccaaagtgctgggattacagtcatgagccacctcgcctggccaatgttgggcttttatacctttcattaaatacaggttaattttgatttggcaaggttttattttcttctccacacctttggtaacaatatggcttacccctaccccaagctcttaaatgtttctttaggcctcagaaaaccggtgagggtccaatccagtgcctcttaagctatctgtgcaggagactggctgttttttactccctaatccattgaagactaatattttaatcaaatatgataaaaatgtaaaatatgatttttatctatctatctatctatatatttttgagacagagtctcactcggtcccctagtgtggagtgcagtggtgggatctgagctcactgctacctccgcctcccaggttcaagtgactctcctgcctctgcttcctgagtagctgggattaccacacccagctaatttttgtatatttttagtagagatggggtttcaccatgttggccaggctggtctcgaactcctgacctcaaatgatccacccatcttggcctcccaaagtgctgggattacaggcatgaaccgcatctgaccaatttttatttattttttaaagtcagcgtcctgccatatcgcccaagttggagtgtagtggcatgatcacagttcactgcagcctcgatctcctaggctcattcaatcctcccacctcaacctcccaagtatctgggagtacaggcccaggcccacactagtacacccagctaattagaattttttttttttttttttttttttttagttggagtctcgccctgtcgcccaggctgcagtgcaatggcgcgatctcggcggctcactgcaaactccgcctcccaggttcaagcaactctcttgcctcagcctcccaagtagctgggattacaggcaccctccgccatgcccagctaatttttgtattttcagtagagacggggtttcaccatgttggccaggctggtctcaaactcctgaccttgtgatccgcccgcctcggcctcctaaagtgctaggattacaggcgtgagccactgcacctggcctttttttttttttgagtacgagtctcgctctgtcgcccaggctggagtgctgtggcgcgatctcgactcactgcaaactccccctcccgggttcaagcgattctcctgcctcagcctcccgagtagctgggacgccaccacctcagactaatttttgtactgtttttggtagagacgggcttcactacgttggctaggctggtctcaaactcctgacttcaaatgatcctcccacctcagccccccagagtgctgggattacaggcacaagccaccatgcccagccaaaataggatttttttttaaaaaaaagcccacaatcacacacttggatgttgtggtgttgtcaaactgctctccaaattcctaaaggcatactctcgctttctgtacttatctctgcctggacatgccaaaacccgcctgcaaatgggcaaggaccagctgggccctaggcactgggtttaaaatgcctgagagggctgggcgggcacggtgactcacccgccccttggggtgaggacacgccctcattgtgacgtcacagaggcgggccacgcctccagcaggattcccggccctcaacccaaggggcgggtgaaaaggtgcgggcacttgccctccttttcggggcgaaggggcggggttagggtgggcgaaggacttacagatttggagaagcccacacagcacacggctctgtcaaacacccccaagcccagcacgtgtaaggtggagagggaaactgagtcccagatgcgcacgtggggcggcagcggctgcagggaagagaggcttgttaccttgggggtgccagctgcttgtcccccacaactgcgtcctgcactcttttctgctttcccctcccttccattaccttcccttccttagtggttcccgccacctgtcccgtggcgatggtgaccatatctgggtggatggccaagctgcggaaagaagggacagagagaccagggctcagtgggagagaagaggctcacagagacccaggacattcattccacaaattggctggttgagtttagtcaataaacgtgtatttagtgcattaatagcagtgagcggatgccctccgggtgcgctggcgctggatcagaagcaagacttaggcctggggcctctaactcaaatgccagcaggacgcaggtctgtacctcacatagtggccaggagagcacacttatttaagggggctgacaccaccctgctccagccaccaggaattgtctggagtgcctattcagttttttttttttttaagaggcggagtctcccagcactttgggaggccgaggcgggcggatcaccagaggtcaggagtttgacacctgcctggccaacatggggaaaccctgtctctagtaaaagtacaaaaattagctgggcgtggtggcgggcacctgtagttccagctactcgggagactgaggcaggagaatcgcttgaacccaggagcggaggttgcagtgagtcgagatcgtgccactggactccagcctaggcgacagagtgagactagttctcaaaaaaagaaaaaagaaaaaaaaaggagatggagtctcgctctgtcccccaggctagagtgcagtggcaggatcatagctgactgcagcctccaactcctggacttcagcgatccttccgccttggcctcccaaagtgctgctttcacaggcgtgagccacctcgctgcccagattttcaaaagaagaaaaagatccaggcattgcgtgaattcactgtctgaattttttttgagacagagcttgctctttcacccaggctggagtgtggtggctcagtcactgcagcctcgacctcctgggttcaagtgatcctctcgcctcaacctcctgagtagctgggaccataagggcttaccaccacacccaactaaaacacctgaaatattgaaatattgatactcaatccacattttcccactaaattcagcctgagggcagctggtggctttggagagggagcaaaggcttagccttgccccaaaccccacagggtagcaatgtgaaaagaggcatagaggggcaggggctggagctccatctccagccacagctccctcccgtcccctctgtcccacatctcaccatttgatgtcatcgttgtgtcccaggtagtgtcgctgcctctgctcctccacgctgtatagcacggctacggaggccacaaagtacactatctccccggtgggcagcaaataaaggttggcccggcagtctcggccacggtagccatagctggagccacccaggggctggttaaggaatgtgttttgttgttgttgtttgtttgttttgtttttatttatttatttatttttaatttttttatttatttatttttttgagatggagtctcactctgtcgcccaggctggagtgcagtggcgtgatctcagctcactgcaagctccgcctcctgggttcatgccattctcctgcctcagcctcctgagtagctgggactacaggcgcccgccaccatgcccggcttattttttgtatttttagtagagacggggtatcaccatgttagccaggatggtctcgatctcctgaccttgtgatccacccgcctcgccctcccaaagtgctgggagccacggcacccagcctatttattttttcttttttttgagacgcagtctcgctctgtctccaggcagcagtgcagtggtgcaatctcagctcactgcaacctccgactccctggttcaaacgattcccctgcctcagcctcctgagtatctgggattacagacacacgccaccacacccagctaatttttgtatttttaatagagatgggatttcaccatgttggccaggatggtctcaatctcctgacctcatgatccgcccgcctcagcctcccaaagtgctgggattacaggcgtgagccaccacgcgcggcctgttttgtttttttaagacagagtctgtcacccaggctggagtgcagtggcatgatcccagctcactgcaacctccgcctcctgggttcaagccattttcctgtctcagcctcccaagtagctgggactacaggcagatgccatcatgccaggctaatttttgtatttttagtagagatggggtttcaccatattggtcagggtggtctccaactcctgacctcaggtgatccacccaccttggtctcccaaagtgctgggattagaggtttgagccgctggcgcccagccgaggaatgtattttgcatcacacacactggctgaggaccagactcaacaaggtcattggaatgaggtttttctgtttccactctcacccctgtagtgggctgatggtcccctcccactccaaaaaaaaatgaatgtctgtttccttttttttttttttttttttttttttgagatggagtttcgctcttgttgcccaggctggagtgcaatggtgtgatctcagctcacggcaacctccacctcccgggttcaagggattcttctgcctcagcctcctgagtagctgggattataggcatgcgccaccatgcctggctaattttgtatttttagtagagaaagggtttctccatgttggtcacgctggtcttgaactcccaacctcaggtgatctgcccacctcggcctcccaaagtgctgggattataggcatgagccaccgcgcccgggctatgtctgtttcttaatccccacaacttgcaaatgtgaccttacaaggaaaatgggtctttgcagatataattatagatctcaagatgagatcatcctggattatcagagtagcccctaaatccgatcacaagtgtccttataaatgacagaagaggcagcctcaatctcctgggcttaagtgatcctcctgcctccgcttcccaaatagctgagactacaggcatgcaccaccatgcccagcaaattttttgtatatttttggtaaagatgcagtctcgccatgctgcccaggctggtctcaaattcctgggctaaagcagtccacttgtcttggcctcctaaagtgctgggattacaggcatgagccaatgcacccagcctgcctggctaattaaaaagaaattttctgtagagatgggatctcgctttgttgcccaagctgatagttatctggtttatttgttaactgctcatattccccaataagactgtgagttccatggtggctgagattgggctgttttttttgtttgtttgttttgtttttttcatttctgtatctcctcctccaggaagccctccatgactccaggctgggtcagccctgtccctgtggattccccatcccagtcttgcacactctgggttgtcactctcaatgagtctgttcccatgctagactgtatgccccaggagggcaggcagatgctgtcatggtcagcactgggtccccagccctatgtctcagatgttcagaaaatatcttgaatgggccaagcacggtggctcacgcctgtaatctcagcactttgggaggccgaggcaggtggatcacttgaggtcaggagtccaagaccagcctggccaacatggcgaaaccctgtctctactaaaaaacacacaaaaaaattagccaggcatggtggcccatgccacccagctactgtagtggccgaggcagaagaatggcttgaacccaggaggtggaggttgcagtgagccaagatcgtgccactgcactctagcctgggtgtctcaaaaacaagaaaatatctgaatgattgtcaatatacatatatcctgaccccatgaaactgctctgacctgcagtcactgcaaaggggagcaatctgaggtcctcacttttgcagtctcagccacctctcatcagatgcttatcaagccctactggcaggacatttgggacagattccaggggatatttccagctgcctcgagaaggctctgggcacccagaaggccaggccatttcaccaaccaccctggctcctccaaagaggaaaccaaggcccagagagaagcagacaaggaccgggttcctggggtgtggactccaagctcaataggattttaggaaaaagtttgggtcccagaatcaggattgttgtctcctacctataacctcagtttccttatctggaaaggaggtataataatttccaaactgtaggcctcagagctcttggaggccactagttgtaaaaaaataaattcatacctggaataacttacaacagtgtctgtcagatagtaagtgcttgagttattattttggatttttttttttttttttttttttttgagaaaggagtctcgctctgtcgcccaggctggagtgcaatagcacaatcatggctcactgcaacctcgacctcccaggctcaagtgatgctcccacctcagcctccagagtagctgggaaccacaggagcatgccaccatggctggctattttttttttctttttcttttcttttttttttttttttttttttttttgagacggagtttcactcttgtggcccaggccggaaagcagtggggcaatctcggctcactgcagcctctgcctcctgggttcaagcgattctcctgtctcagtctcccgagtagctaggtttacaggcacatgccaccacactcggctaatttttgtatttttagtagagacaggatttcatcatattggtcaggctggtctcaaactcctgacctcaggtgatctgcccacctcggcctcccaaagtgctcagattacaggcatgagccaccgcgcccggcctgctattttatttcctgtaaagacgaggtcttgctatgttgctcaggctggtttcaaactcctgggttcaagtgatccacccacctcggcctcccaatgtgctgagttagtgttttatcagtccctgtgcatggggcacatactatgagctcagtacctttacacattatttcacaggtctatggacctgagatcataaaattcatttttcagagtcaagacgacttttccagggtcacacggccaggtacgggctggactggggtttgaacccatctctgtcagactccagagcccgggcttccagccattcccaactctttttgctcaaatgcaccaatcccactctggccacatagcccttgaacgtgctgtgcttgttttgtgtgttgcccaggcaggtctcaaactcttggcctcaaacgatcctcccaaagtgctgagattacaggcctgagctgccttgaccgcctttctatttcctcctggggggatgggagcaccaaggagattccagcaaaaggatacacccactccagcttgagccggcaagaaggcagctccgagcgtgtgtccaggctgtaggtgggtgccagctcgtctgggatcatcatgggcacagggcggcccctcaggaacattttcacggagccatcctctgccaggacacccccagaggtcaggcactgacaccagccccatccctattccctctcctcttccagctttatttatttatttttttaaaggcagggaaactgaggccagagaggcaaagacccagtagccaagactcctgacctctggctccagcctgtcaccccaacaagcaagcttccaccgagcccttccccatctccccactcacccacactgaagataacttctttggttttgctgtcaggaaaggacaaagaaaaaaaaagggtcttagtattcagttcagaaaaggggagaaaccattcctccacccccaccgctccccggaggtctccgatgaaaacggggccgagtaaggggcagagcgctgcctctctgcaggccgtgtgctttgctcggttgatcttgcagagcctaagacacaggcccagagaggcagtgatcgccaaagatcacacagcacgaagtggcagggacgcgatcctggaagaagggagtcaccaaggacccttccctcctaatcagcaaggtgctccccagcgccccccacccgcagttcccccagcacaccaaacgtcaagcagagggagaaacggggagagtttaagggaaggggcgtgtccccacgccggtctgggtcccaggggttgggtgaaacctgagatctaagccccgggagcgcggagaggagatggggggtggtctgcgaaagggtctcacccagctccaaagctactcatggcggcgggtggcggagcttcggggccgggggtggagccgggaccggctctgccgcttccggccctgggaggcgcccgggccgccgcgcccctgccccgccctccacagccacccctggagccggagggtcccaccgggtcacacatcccgggctgtggactcccgatcccaggttctttcggggtgggtgggggagagtggttgagaacatggactcgggagcgcgcctgcttgagttaaaaccccagttctgctaattcctagcagtgtacacaggtcgtccaacctctgcctcggtttcctcatttaaaaaatggggataataagagtacccggccgggcgcggtggctcatgcctgtaatcccagcactttgggaggccgaggcgggcagatcacctgaggtcaggagttcaagaccagcctggccaacgtggtgaaaccccgtctctactaaaaatacaaaacttagcctggcgtggtggctggcgcctgtaatcccagctacttgggaggctgaggcaggaaaatcattcgaactcgggaggcagaggttacagtgagctgagattgtgtcattgcactccagcctgggcaacgagaacaagactccgtctcaaaataaataaataaataagagtactcacacctcccgggggtagttgcgagggtgaaattggttaattattgggaagtgcctggagtatacacaacgctgtatttgtgtttgctatgtttgagcagagttgaaatgtgcagcttttgaccttggtcttgcccttgcgtggcctcctagcgctgaccacgcccactgcaccataactccagccttagggtgatttttgttttgttttgtttttgatacagggtgtggctctgtcgaccaaactggagtgcaatggcgtgatcatggctcactgaaacctcgaatttcctaggcttaagtgagcctcctgccgcagcctcccaagtagctgggtctacaagcgaaggccagcacgcccggctattttctttctctctctttttttttttgttttttgttttttgttttttgtttgtttgtttaacggagtcttgctctgtcagcaggctggagtgcagtggcgcgatctcagctcactgcaacctccgcctcccgggttgaagtgattctcctgcctcagcctcccgagtagctgggactacaggcacgcgccaccacgcccatttttgtattattaatagacagggggtttcaccatgttggccaggatggtctcgatctcttgaccttgtgatccacccgcctaggcctcccgaagtgctgggattacaggcgtgagccaccgcgccaggcctaatttattttcatttttagtaaagacgagggctcgctattttgcccagcctggtctcgaactcctgagctcaagcgatgattcccgcctccgcctcccaaactgctagaattatatagccttagtttttgactctgtccagatcttcagtatggccccgcctctggagttgaccacgcctgtcattctgagcctcccttctaaccctgtccctgagttgactcagttgcttgagaattgactgctacctcccgccaacgctccttctccggcccgccaggcattctgattacgtccattttcacgtattccttatgtgaataccttcgaggcctccaagttggctgcacctcttggcatttgaccacgcccctacggccccgcccaacctttaagccacgcccttttcaacctggcagtgccccccgattttgatgtcaaagcttctggaatctggaatgcctccacctggtctcagcctctgttactccgtaccccagattttaatttcgcccaggcgaacactgtggctgcacccttaaattcctcagactccctctttccttgtagaaactctgtggctgctgccttgacttcatccctgaaactcaacggggcctctcctgtaccttaataaccacgcccataagccaagctcctccctgacttcctcacccagtagacctgaccgtccagcttctaaaaactctggccacgcccctcaatattgactccgccctcccagaccttccactgttaccgtgccacctcaagattggtccctccaaggctctggcaccgtccccgcttttgaactagctggccccactctaggttacgacctcgtggcctggggcatgactacatttctcgaccatttcctccctatctctttctgcggcttgacgccgccccagtccttacccttcctttttggcgctacagttgctgctggaggatgtggtccggctgcgggggtcctcacggcgcaccgaggcgaggcgctctggtgacaagtagcggcggacactgctaaaagagagcacacaggtgggggcagagccttctaggccagcaggcgagtgccgtgagcaagcgagattctccctgcaccctctgctgctggagctcaggcaaacaaaccacctctgtctcccacgaggtcttggaagaggctgggggtcccggccttgtgccttacctgcgcccggaggtcgcctccttcttgggagaggatggggacgtggcatagccacccacgcgccgcgggggtcccgagccattaaggggcgtcctggtgggaaggcctttcaagagctgacacactggagggatggggttaggggacagaagagggtgagtataaggaccaggccccggtcctccccatcccacccctccagtctaacggggatacccgaggcagtggtgcctaagcgcggaggcgcccggcccttgggggtgccccgcgcgcgtagcgccgctccctgttcttcgcatgcccgcaggcgacgcagagcatccgccagcgccgcctttaggaccgccagctcgtcttcctgtaactgcagccgctgctccagcgccgacacgcggtcgtccacttccataccgctcgtgcccgacaaattgtcatctggaagacgggggagtgccggctgcagggccacccaggagctccagtgcccaaggggtccctcccgccttcctgggtctaagcggggggccagccacgcccctttcctgtcccgctacctggggctgggacacttggacatgagccaaggaagaggactctgaagggggaaggaaatccccacagctctccaacccatccgcacactcctctctgccacagcgcgctggccgtgtgaccttggggaagtcccttccctcttattttctaagagtctgtgaacccaggagcctctcgctctggctttaagatgctatgactaagacgtgaccaggcgcagtggctcacgcctgtaaccccagcactttgggaggccgaggcgggcgtatcacgaggtcaggagatcgagaccatcctggccaacatggtgaaaccccgtctctactaaaataaaattaaattaaaaataaaataaaatttaaaaaaaagccgggcgtggtggcgcgtgcctgtagtcccagctactccggaggctgagacgggaatcgcttgaacccggggggtcggaggttgccgtgagccaagatcgcgccactgcactccagcctggccacaaagcgagactccgtctcaaaaaaaaaaaaaagaaaaaagaaaaagaaaaaaaagattctttgattttatgactaagacgttaagtatctatgagtgataagagcatttgcaaaatgacaccaacctactcctaatgacactaaagttctagaattgatccccaacatcctccgacgaagattctgttatgaataccaacgtctcttcactgtttctaagactttccaagccaaaaggtcatgcctagcctccccgtttcccctcctctcctcaccctggggttcgaccctagagccagctgcaaggacagagcttcggcggcccctggcggcggacttgggggttgcaggcagcgcatggcagacccagaagacccaagggagatgcagaccggattgacaaccaaactcttccccagcaggcattcctcttttctgttccccttctttatttcgcctctgtaccccgcgccccagatttggctctccagcctatgggtgcagccaaaatgactccccgagtcgcccccccaaccccgctcattttcccaaagtgggaggggcggagaccgaagtggcccctctcccccttttcccgcagaatactcatacccagactcattgctgaccacaaccaaggaagccctggttcccagcctggtggaagtaaaggtggtagcttagacggggacagggcgtggagctcgcccctgccatcccgcgtccacaggccgcgcagctggccctctgggctccgcagtgcagccgccgctcctccctccttcccttcgtagcccaatcgcctgccgaggcttgcccgccctgccccccactcagcgcctcccaggtccggtgcctggacctgcagagggaggtgggagcctcctgaggtcagaaggagtgagccgtcaggacttagaactcgtaacagggggaaacctctaggggtcttgttggcatcacgttttgcagacgggaaactaaggaaggaggctagtaggagtgtgcagagacacgccaaagatcactcagcccgtaggtgggggctggggacccaatcacctcctgtgctcagcctggtcctacctaccattaattatacgaccagaaaaatggcatctgttactgtgagcttacatgtgccaggcactgctcacgcaaaacatttagcacgttcccggctcatgttgatgctcgataaatccagaataggattaactatttttatgatacctaatgcttttggcaactctagtagttgtagtagcataatccattttaggaggagaggaggaggaaggttactgaagcccagaaaggtgacgttacttgttacacggacacacagccgttcaatggaagaacccatactcaacaggaatggccaccctgtcattctggctcttagagggacagaggaggacaaaataagcattctgggtcccctgccaattccagtggtccctggcactagggtgtgtgcccagaggactgaacctccaaactgagttaatagaggtgctttcatcttgacccttctgccccacccagagaggccagctgcactgtcaggccttggccagcccatcctaccaacccccacacctccaccatccccatccctgtgactcaagccctccgctccctcctgaccatccccccatcctcagccttttcccagagaccaggcctcacttcccacttttccctcccaactcccctcttctcctatctcccctcacctgagcccgacacccacagtggtccttctggtatcacacccatttgtctagggagaagggatggtgctaatgcatgggagggccagggccagaggatttgggaggtatcctagaagcaaagtcctctggccgtccctttccagtcccacactctgccctcaactcaacaccaaatccacccccaccccctctgtctgtccccctgctatggagataggggagcattccagaagcttgaggggagagagaaagggcagagttccaggcccaatcgacccccaggccgttcccccttccaatcccaggttccttcgggttctgcccccttctctcctctccgtctagccacctcgggagtacagaaggatccaagtggatggggggctgggatctaggttttggggaccagggaccttgctcttgggtcagggtcctgctgagggagagaaaagggggatcttcagcaagggagggggttggggacttgcaaggaggaggctggggcaagaagagatgggtccagccttgggcggggccaaggtcggaactgaggaggggtctcaccgttgcagtatcgcagcagcgaggacgtgtcgtacaggccgcagaaggccgggccgcgctccgccatcgccccaccacagccaccgccggcccccccggtcccagcccgggcccggtccccccaaccaggccctgcctcccgttgccatagcaacgcccttcgttccagcatccccagctcagctcgcctggcatcaggcggccggcgccgggcccggcgctggggtcatccccaggatgcccagaaaggggggtcgggacaccgcctgccaagccccccaacacaatcctagggccaggattggctgcgcccggatccccctaggtaccgtctggtcccgcccacaaccggagtatagtctctctagacccccctcctcgcccgttcagaaccaatgagagcctgtcgcgcagggcccttcaccaatagggatgcagagggattggaaggggcagggtctttcctgctttcagcctgaagcgcagccccgagctccgggaggaggatggtgtggaggaagacactccactatccccaaaacctcttcagactttcattggattttccaaaagccccctccgtaaggccagggcccgaccttagagccccaaacccgcccagggagctcttgtttatgacatctaggcccacccccaggctcttagccccacccccagaatcttgcgggtgctaaagttttattcctacccacggaatcattagcaccgcccctgaaccgccaagggtttatagtatagtacttctccagagctctggacaggaccttcttataggattagctctggcctcggaatttaaatccctccccccgcggtctggtagtccctccctaactttccccaccgctctgtctgcggccccaggcccttagctccgcccttagagccctagcctcccacaaccgcattatccagtccgggctttggcacaggcccagttgtgaggcttggactagcccgcgtgtcaggcagagatggctcgaaagttgtgggggaaaaggggagggtacaaaacccgacaatggatttcaagaatattggaccgccttcctcaagtctccaacgacggtaaacacctagagtataggcaggagaagtgaagtccggagccgaaaaagaattccctctggacacagagatgaaaagtagaagttttggaagcagattgacctgggtttgaatcctgactcctccactttctggtttcgtgaccctaaagctccacttcctcatctggaaagtgggggctcataatcgcgcctgcctcattcattcattcaaaaatgtttactgagtgcctaacgggccaggctctgttctaggtgctgaagttttcggaatgaccaagtgaacctgtttcctctcatgtattgttcatttaatggaagaggtaaacaatcatacacaaaataaataacaatacctaacgtttaatcagcagtcactatgggcaaagcactcagttatcctcaccaaaagccctattttgttgttgttgttgttgttgtttgcttgtttgttttcgagacggagtctctctctgtcgcccaggatgtagtacagtggcacaatctcaactcactgcaacctccgcctcctgggttcaagcgattctcctgcctcagccttcagagtagctgggactacaggcgcacgccaccacgcccagctaatttttgtatttttagtagagatggggtttcaccatgttggccaggatggtctcgatctcttgacctcatgatcctcccgcctcgtcttcccaaagtgctgggattacaggcgtgagccaccgcgcccggcctatttttttatattttaaaaatattttgtggagaattgcttgagcctgggaggcggaggttgcagtgagccaagatcgtgccactgtactccagtctgggcaacagagctggagagcagaggcgcgatcttggctcactgcaatctccgcctcctgggttcaagcgattctcctgcctcagcctcccgagtacctaggactacaggtgcctgccaccacttccagctaatttttgtatttttagtagagacggggtttcaccatgttggccaggctggtttcaaacttctgaccttgtgatccgcccgcctcgacctctcaaagtgctgggatactttttccttttttttttttcttcttaagaaactgggtctcccactgttgctcaagctggagtgcagtaacatgattatagctctctccctctccctctccctctccctctccctcctctccctcctctccctcctctccctctctttccacggtctccctctgatgcagagctgaagctggactgtactgctgccatctcggctcactgcaacctccctgcctgattctcctgcctcagcctgccgagtgcctgcgattgcaggcgcacgccgccacgcctgactggttttcgtatttttttggtggagacggggttttgctgtgttggccgggctggtctccagctcctagccacgagtgatccaccagcctcggcttcccgaggtgccgggattgcagacggagtctcgttcactcagtgctcaatggtgcccaggctggaatgcagtggcgtgatctcggctcgctacaacttccacctcccagccgcctgccttggcctcccaaagtgccgagattgcagcctctgcccagccgccaccccatctgggaagtgaggagcgcctcttcccggccgccatcccatctaggaagtgaggagcgtctctgcccggccgcccatcgtctgagatgtggggagcgcctctgccctgccgccccgtctgggatgtgaggagcgtctctgcccggccgccccgtctgagaagtgaggagcccctccgcccagcagccgcaccgtctgagaagtgaggagtccctccgcccggcagccaccccgtctgggaagtgaggagcgtctccgccaggccagccgccccgtctgggagggaggtgggagtcagccccccgcccggccagccgccccgtccgggagggaggtgggggggtcagccccccgcccggccagccgccccgtccgggagggaggtgggggggtcagccccccgcccggccagccgccccgtccaggaggtgaggggcgcctctgcccggctgcccctactgggaagtgaggagcccctctgcctggccagccgcaccgtctgggagggaggtgggggtcagccccccgcccggccagccgccccgtccgggagggaggtgggggggtcagccccccgcccggccagccgccccgtccgggagggaggtgggggggtcagccccccgcccggccagccgccccgtccaggaggtgaggggcgcctctgcccggctgcccctactgggaagtgaggagcccctctgcccggccaccaccccgtctgggaggtgtaccaaacagctcattgagaacgggccatgatgacaatggcggttttgtggaatagaaaggggggaaaggtggggaaaagattgagaaatcggatggttgccgtgtctgtgtagaaagaggtagacatgggagacttttcattttgttctgtactaagaaaaattcttcttccttgggatcctgttgatctgtgaccttgcccccaaccctgtgctctctgaaacatgtgctgtgtccactcagggttgaatggattaagggtggtgcaagatgtgctttgttaaacagatgcttgaaggcagcatgctccttaagagtcatcaccactccctaatctcaagtacccagggacacaaacactgcggaaggccgcagggtcctctgcctaggaaaaccagagacctctgttcacttgtttatctgctgaccttccctccactattgtcctgtgaccctgccaaatccccctctgcgagaaacacccaagaatgatcaattaaaaaaaaaaaagaaaaaaaaatattttgtacagaggagctcttgctatattgccaaagctggtctcaaactcctggcctcaagtgatccttcggcctgggcctgtcaaagtgccggaataatagatgtgtctcactcactcttgccctggctgtaatgcagtggcatgatcttggctcactgcaacctccacctcccagattcaagcgattctcgtgcctcagcctccccagcagctgggattacaagtgtgcaccaccatgcctggctaatttttgtatttttagtagacacagggtttcaccataatggccaagctggtctctaactcctgacctaaagtgatcctcccgtctcagcctcccaaaatgttaggattacaggtgtgagccaaccgcacccagtaaaagttcaattttaatcaccattttagagatgatgatacagaaacagtgtggcagtgactcaacctgttaatccccagcactttcaaaggccaaagaagggggattgtaggggtgcgagatcagcctgggcaacaaagcaagaccccgtggctacaaaacaaaatttctttctttttttttttttcttttgagatagagtcttgctcttgtcgcccaggctggagtgcaacggcacgatcttggctcactgcaatctccgcttcccaggttcaagcaattctccagccttagcctcccatgtagctgtgattacaggcacccaccaccacgcccggctaatttttttgtatttttatttttatttatttatttttgagatgaagtctcgctctgttgcccaggctggagtgcagtggcatgatctcaactcacgacaacctccgcctcccgggctcaagcaattctcctgcctcagcctcccaagtagctgggactacaggctcgcgccacaatgcctggctaatttttgtatttttagtagagacgagggttcactatgttggccacgctggtctggaactcctgacctcatgatccgcccacaccggcctcccaaagtgctgggattacaggtgtgggccatcgcacccggccaaaacaaaatttttcatcctcctgacatggtggtgcacgcctgtagttccagctacttggaaggctgaggtgggaggatcacttgaacccaggaggtcgagactgcagcaagctatgatcatgccactgcactccagcctgggcaacagagcaagaaggtgtacagacaggataatatagtaaaaaaagggagcaggaggctcatttagagaccctagatccagggcagttacctctgaggaaatgacatttgagctgacatgtgaaaaataagaagggttgggcacggtggctcatgcctgtaatcccagcagtttgggaggccgaggcaggcagatcacctgaggtcaggagttcgagaccagcctggccaacacggtgaaaccttgtttctactaaaaatacaaaaattagctaggcatagtggcatgcacttgtaatcccagctacttgggaggctgtggcaggagaattgcttgaaccagggaggtgaaggttgcagtgagcagagaccacaccattgcactccagcctgggtgacagaatgagacttcatctcacaaaaaaagaaagaacaaaaaaaaaaaaaaaaagaaagaaagaaaaagaaaaacaagaaggaagcagttatgcctggagttgggaggcaggggatttctaggcagaggaaacagcaagtgcaaaagtcccgaggttggtttgagtttagcatattcctggggcaaccagaaggttgatgacgatgaagctgtggagagataggggaagggggggatgcgaggccagggaggctatgggccttccatatcttgcagggcctcaaaggctgggggaagactttggcagtttgtcactgtatcctccacaagccacagtgaggccacagatataaattatatatgagtggccaggccacgcctgtaatcccagcattttgggaggccgaggtgggtggatcacttgaggtcaggagttccagaccagcctggccaatatggcgaaaccctatctctactaaaaatacaaaaattagccaggcatagtggagcatgcctgtaatcccagctattcagaaggctgagacaggagaattgcttgaaccctggaggcagaggttgcactgagccaagatggtgcccctggactccagcctgggcgacagagcaacactctgtctcaaaaaagaaaaaaaaattatacgtgagtacaatgcctagcacacaatgaggcatcaatgatgggccgggcacagtggcatgtgtttgtagtcccagctacttgagaggctaaggtgggaggatctgttgagctcacgagtttgggctgtagtccactatggcaattaggtgtctgcactcagttcagcattaatacggtaccccttggagtgggggaccaccagttgcttaaggaggggtgaactggcccaggtcagaaagggaatagggcaaaactcccatgctgatcagtagtgggatcccgcctgtgaatagccactgcactccagtctgggcaacatggcgagaacctatctcataaaaagtaaaaaacaggggctgggtgcagtggctcatgcctgtaatcctaacactttgggaggctgaggcaggtggatcacgaggtcaggagatcaagaccagcctggccaacatagtgaaaacccatcctaaaaatacaaaaaattagcagggcgtggtggtatgtgcctgtaatcccagctactcaggaggcagaggcagaagaatcgcttgaaccagggaggtggaggttgcagtgagtggagattgcgccactgcactccagcctgggcgacagagcaagacatcatctaaaaaaaacaaaaaaacaaaagtaataaataggactgggtatggtggctcacatctatactttcagcactttgggaggcctaagcccagaaggatcacttgaggccaggaatttgagaccagcctaggcaatatagcgagagctcctctctacaaaatatttaaaaattagctgggcttactttttttttttttttttttttttttttttgagatggagttttgctcttgttgcccaggctggagtgcaatggtgcaatctctgctcactgcaatctccacctcctgggtccaagcgattcacctgcctcagcctcccaagtagctgggattacaggcacgtgcaaccatgctcggctaatttttgtatttttagtagagacgggggttttactatgttggccaggctgctctcgaactgctgacctcaggtggtccacccaccttggcctctcaaagtgctgggattataagcgtgagccaccgtgcctggccagttgggcttacttcttgttgaacaggtctaaaaaaagaaaaataggcaggcatggtagctcatgcatgtagctccagttacttgggaggctgaggctggaggatcacttgagcccaggagttcgaggctgttgtgagctaggatggcaccactgcactccattctgggtggcatagtgaaaccccatctttttttttgagacggagtctcgctctgtctccgaggctggagtgcagtggcgcgatctcggctcactacaagctccgcctcccgggttcccgccattctcctgcctcagcctctcgagtagctgggactacaggcgccggccaccgcgcccggctaatttgttttttgtagtttttagtagagacagggtttcaccgtgttagccaggatggtctcgatttcctgacctcgtgatccacccgcctcggcctcccaaagtgagaccgagcgcccggccgtgagacccccatctcttaaaaaataataaataaataggccgggtgcggtggctcacgcctgtaatcccagcactttgggaggccgaggcgggcagatcacgagggcaggagatcgagactatcctggctaacacggtgaaatcccgtctttactaaaaaaaaaaaaaatacaaaaaattagccgggtgtggtggcgggccctgtagtcccagctattcgggaggctgaggcaggagaatggcgtgaacccaggaggcggagcttgcagtgagccgagattgcaccactgcactccagcctgggcgatacagcgagactctgtctcaaataaataaataaataaataaataaataaataaataaataaaataaacaaataaaaaatcaatgatgggttcaaagtgatgaccaaaatagccgtgggtccttatcctcccacgatcaccgctaattgtgttactggtagaaacaacgcgggaggttttctgccgcccaaatcaccactaattgtgttactgatagaaacaacgcaggaggttttctgccgcccaaatcacgcttctcccacccgccaatcctcttgagctcagattctaggagaggggaagtcagacacccagatacagaattctgaagcaggctgcaaagtgttaagggctgttactggggtgtcccgagaggaccgtggaggcccaggggaattcagatccatgggctccatatggtgcgggaggaggagggaggagagccaggcacagggatttagcttgatgagttatgggaggtgggagatgacacacaaagatgagtcagacctagtccttgcccttgaggggctcccagcctcagtgcagggaccactgtcagggtccatgcgagctaagtgatcttggcttggtttttcctcctctgcaaaacgggagtcatcccagcccccacttcccaggggagcagagcaggttgaatgggctcatgctgataaagtgcccagcacagtggtttgggggtacaggtaacggagctggtttgatgacaagtgctttcgcagggaggtgtcaaggatgtgggagataggcgtggggagagggcggctctgtctgaggagggggtgcgggcaggcagggctcacagtctctgtctttctgcctccaggtttccttctccctaaggcttttcgctctcatctctatctctgtttttcttcatgtttctgtatagaaattggatttcatcctagtactttgggaggccgaggcaggcggatcacctgaggtcaggagttcgagaccagcctgatcaacatgcagaaaccccgtctctactaaaaatacaaaattgctgggcgtggtggctcaagcctggaatcccagcacttctggaggccaaggcgggcggatcacaaggtcaggagatcaagaccatcctggccaacacggtgaaacactgtctctattaaaaatacaaaaaattagccgggtgtggtggagggcacctatagtcccagctactcgggaggctgagcaggagaatggcatgaacccggaaggcggagcttgcagtgagccgagattgcgccactgcactcaggagacagagcgagaccctgtctcaaaaaaaaaaaaaaaaagaaaaagacaaaaagaaattagctgggcctggtggcgcatgcctgtaatcccagctacttgggaggctgaggcaggagaatttcttgaacccaggaggcagatggtgagctgagatcgcaccattgcactccagcctgggcaacaagagtgagactctgtcttaaaaaaaaagaaaagaaaaagaaattggatttcaaagttaactggccaagtgtggtggctcatgcctgtaatcccagcactttgggaggccgaggcaggcagatcacctgaggtcaggagtttgagaccagcctggccaacatggtgaaaccccgtctctactaaaaatacaaaaattagcctgatgtggtggtgggcacctgtaatccttgctactggggaggatgaggcaagagaattgcttgaacccaggaggtggaggttgtagtaagccaagattgcaccactgcattcagtgagccaagatcgtgcctatgcacgccagccagggcaatagaatgagactccttctcaaaagacaacccgggtcctgatttcaacacctatgagacatgtcaccctgatcaagttacttcccttctctgggcctcagtttccctatccagaaaatggggataatataacacctctgctataggtctgttatgagaagggacatatagatgtgtaaaatatccaatatggtggccattagtattattattactgatactaatctcagactctgtttttctctcagcatctcttttttacatttatttatttatttatttatttatttacttgagatggagtctcactctgtcgtccaggctggagtgcagtggtgtgatctcggctcactacaaactctgcctcccaggttcaagcaattctctagcctcaggcttcccagtacctgggattacaagcccgccaccacgcccggctaattttttgtatttttagtagagacagggttttaccatcttggccaggctggtcttaaactcctgacctcatgatccaccagcctcggcctcccaaagtgctgggattacaggcgtgagccaccgcacctggctactttctttcattctttcattttttgtttgtttgttttttgagacagaatctcgctctattgcccaggttggagtgcagtggtgcaatcatggcccacagcagcctcaacctcttaggctcaagtgatcctcctgcctcacccttctgagtatctgggactacacgaacgagcagccgtgctttgctaatttttaaaaattttttttgtagagacagagtctcactatgttgcccaggctggtctcgaactccggggctcaagcgatcctcccatcccagcctcccaaagtgctgggattacaggtgtgagccaccatgcctggcctctttctttgtgtttctctctctacgtctcattctgtcagctcgtccccctacttgggtttatgtttgagctgggagcttcacaaagccagagcaagagctgtcccagtcaccagggtccccagcattgccaagctcatagcctggcatgtaacaaacgtccagtaaaatgcattgaactctgacctctgctgaaccaatgttgggcaatgctggagacacagcagtgactgagacagccccagtcctgccctcatagggcacatagtgttgggcacggtggctcacgcctataatcccagcactttgggaaactgaggcggtggatctctttttttttttttttttttttttgagatggagttttgctcttgttgcccaggctggagtgcagtggcgcgatctcggctcaccacaacctccgcctcctgggttcaagtgattctcctgtatcagcctcctgagtagctgggattgtaggcgcacgccaccacacccagctaattttttgtatttttagtagagacagggtttcatcatcttggccaggctggtctcgaactcctgatctcaggtgatccacccacctcggcctcccaaagcgctaggattacaggtgtgagccactgcacccggactggatctctctctctctttttttttttttttgagatagagtcttgcactcactatcgcccaggctggagtgcagtggtgcgatctcggctcactgcaagctctgcctcctgggttcatgccattctcctgcctcagcctccccagcaggtgggactacaggcgcccgccaccacgcccagctaattttttcatatttttagtagagagagggtttcactgtgttagccaggatggtctcaatctcctgacctcgtgatccgcccacctcggcctcccaaagtgctgggattacaggcgtcagccactgcgcccagccaactggatctcttttttatgttttgttttattttgttttgagacagggtctcactgtcacccaggctggagtgcagtggcatcatcttggctcactgtagcctggacctccggggctcaagcaatcctcccatctcagcctcccaactagctgggactacaggcatgcaccaccacgccattaatttttcgtattttttgtagagatagggtttcacgatgttgcccaggctggtctccaactcctgggctcaagcaatccacccaccttggcctcccaaagtgctgggattacagctgtgagctacaactcctagccaagaggctttctttaggacaggagttcaagaccagcctgggcaacagagtgagaccccatctctaaaaaaaaaataaaaatatagccgagcgtggtggaggccacctgtaaacccagccactcagcaggctgaggcatgagaatcgcgtgaacccaggaagcagaggttgcagtaagccgagatcgtgcactctagcctgggtgacagagcaaaatcccatctcaaaaaatcataataattaaacaaacaaataaataaattagctgcactttgtggcctgtgcctgtagtcctagctactggggaggctgaggtgggaggatcattgagcccaggaggtcaaagctgcagtgagccatgattgtatcactccactccagtctggacgacagagcaagacgctgctcgaaaaaaaaaaaaaaaatagcctagagggaaaggcctaggtttgcctgctctccctgaggcttgaaaaggggcttaggggcttgctgagcactaccagggagcaatcagggacccctacaagtttgaatctttcaattgatccttcccagggctggcggtttacactgggttttggagccgtctctagggccccagctgagagcccctctgctggcctctgaggccctggagcccccacctccccctcccgcatgagattatgtcaacatagcccagacgcttctggccaggacaatatttgccctcaggatctggggaggtcgctatggagatgtgccctcccagactaggctggaagacgccgaggggagccatgcgtctctgtctcacggagtctgacttaatccctgttctcttctgggatataagtccctctctctgttttcgtccctctctgttcccctcctttccctttccttcccctctcctccccttccctctccctgtctctctctccttttttttttttttttttttttttgagatagggtctcactctgtcacccaggctggagtgtagtggcgtgacctccgcctcccgggctcaagccatcctcccacctcagcctccccagcagctgggaccacaggtgcgtgccaccatgcccagctaatatttttttgtagagatgcagttttgccacattgttcaggctggtctctaactcctgagctcaagcgatctgtctgcctcatcctgcgatctcggatcagtgcaacctccacctcccgggttcaagtgattctcctgtctcagcctcccgagtagctgggattacaggtgcccgccaccacacccggctaattttttaatttttagtagagacgaggtttcaccatgttggccaggctggtctcgaactcctgacctcaggtgatccacctgcctcggcctcccaaagtgctggtattacaggtgtgagccaccacgcccagccttgtttcttaggtcttatctctctgggtgtcctctctgtccctctttctctgggtccccatctctgtgtttctgtctctccgtgtctctgtctctccttgggtttcatgtctgtgtctctctttgggtctctatattttttgtttgtttctccaggcctctgtctcgggatctctgtctcttcccatctctggactcccctctctctggttcacatccgtttgtctgtgtgtgcctggacccacatctctcgccaggtctctgtctcagctctgctgtctctctcactctctgtatctcttctctttctgtgtatgtgtgtgtctctgtgtatctgtcattcaggcctcatctctctgcagtcctgaatctccgagatggagagggggctgtcacagcttcccattcctggtctctgtccccacggggtgccccctctccccatctctctctgcctcatttctctggcaccatctgccagcaccccaggcccccgcctgctccccgcagggtctgcttagccaggcagccccatgtggggagacacaggccttgcagcttccaccccacccttgcatcctggacaggggcactgcctggtcattgctggagggccgggggaggcaggagtgcaggagaccagagccaggagaccagggaccaggggcaatggatagaaacagacgcaatcccagagaggagatggaaaaaggggaagagaaaggagaaactttaaagactggcaaaatgaggctaatccagagggagagagagagagtgaaagaacccagcagagaggcagaatgaaacatggaaaaagagaagagaaaagccttcccaacagacaggagaggaagacagaggcaaactgagtgtgggctcagagaaaaggagtaaagaggcagggcacagtggtgcacacctgtaatcccagcactttgggaggctgaggcagatgaatcacttgagcccagaagttcaagaccagcctggacaacatagcgagacaccacctctacaaaaagtacaaaaattggctgggcaccatggttcacacctgtaatcccagcactttgagaggccaaggcaggtgaatcacctgaggccaggagttcgagaccagcctggccaacatggtgaaatcccatctctacgaaaaatacaaaattagttgggcatggtaggcacatgctgtaatcccagatacctgggaggctgaggcacgagaatctcttgaacccgggaagtggaggttgcagtgagccgagatggcaccactacactccagcctgggtgacagagacaaactccatctcaaaaaaacaaaaacaaacaaaccaaaaggctggacacgtaatcccagcactttgggaagccgaggcgggctgatcatgaggtcaggagtttgagaccagcctggccaacacagtgaaacgccgtctctactaaaaaaaatacaaagaattagctaggcatggtggcaggcgcctgtaatcccagctacttgggaggctgaggcaggagaatcgcttgaacctgggaggtggaggttgcagtgagctgagatcgcaccagggaactccagcccgggcgacagtgtgagactccgtctcaaacaacaacaacaacaaaaattagccaggtatggtggcatgcgtctgtggtcccaactactcaggaggctgaggtgggaggattgcttgaacccaggtaggggggtcgaggctgcgttaagctgtgatcactctactgtgctccagcctaggcaacagagggagaacctgtctcaaaagaaaagaagaggagtgaggagatatttggatgaaagagagaaacaaggtaggatggacagaaagagagagagacattgggtcagggaaggtgggagagagatgggagaggcagaggggttgtaggagaggttttgctaaacaagactagagacggaaaatggagatccatcggggtgggtgtggaaaggctggggaatgaggctcctctggttctgagtcccctgttgcgggagtggggcgtggaactcagctgtctgggaggggctgagttgggatggtgcatgctgtttctcggcctgaagttttcagaagccatgagcaacgcagctggagggagcctgtgcagccagcccctttgcagacgctgggagacaacagaggaccccaggagggctgaggtgggcagaagaccaggcatctacccacccctgactcctcatcctgtcttcagaagtctcactctgatgcccagcgctgtggtgcagtctcagctcactgcaatctctgcctcccaggttcaagtgattctcccacctcaatctcccgagcagctgggattacaggcacgcgccactacacccagctaacttttgtattttagtagaaatggagtttcaccatgttggtcaggctggtctcgaactcctgacctcggtctcccaaagtgctgggattacaggcgtgagccacggcacctagcctctcctcttttcttttcccttccctcccctcccctcccctgcccttcttttcttttgagacagggtctccctctgttgccgaggctggagtatagtggtatgatcacagctcactgcagcctcgaccccctccccgggctcaagcaattttcactcagcctttccatctcgcagtttcttttctggattttttttttttttttttttttttagatggagtcttgctctgtcgcccaggctggagtgcagtggcgcgatctcagctcactgcaagctccacctcccgggttcacgccattctcctgcctcagcctcctgagtagctgggactacaggcgcccgccaccacacccggctaattttttgttttttagtagagacggggtttcaccgtgttagctaggatggtctcgatctcctgacctcgtgatccacccgcctcggcctcccaaagtgttgggattacaggcgtgagctaccgcaccaggccttttctggttatttatttatttaattttttgagacggagtctcgctctgttgcccaggctggagtgcagtggcgcgatctcggctcactgcaagctctgcctcccgggttcatgctattctcctgcctctgcctcccaagtagctgggactacaggcgcccaccaccatgcctggctaattttttgtatttttagtagagacggggtttcaccgtgttagctaggatggtctcgatctcctgacctcatgatccacccgcctcggcctcccaaagtgctgggattacaggcgtgagccaccgcgcccggccctggttatttttttgagacagtctggctctgtcgcccaggctggagtgcagaggcacgatctcagctcactgctacctctgcctcccgggttcaagcgattctcctgcctcagcctcccgagtagctaggactacaggcgcccaccaccacgcccggctaatttttgtatttttagtagagccggggtttcgtcatgttggccaggctggtctccaacttgtgacctcaggtgatccagccacctcggcctcccagggctctggaattacaggtgtgacccaccgcgcctctctgtctctctccggctcagtccctgttttctctttcttggcttctctccctcaccccctcttatctgtgtctgtgttgtctgtttgtctctgtgtgtgtttctctctgtcgctgtctctctctgtctctctctccccctctctctctctctctctctgtttcttctagtctctctcttgtagtctctctctcttggtctttctcttcttgcttttttttttttttttttttttttttgagacagagtcttgctctgtcgcccaggctggagtttagtggcacaatctcagttcactgcaacctccgcctcctaggttcaagcaattatcctgcctcagtctccccaacagctgggattacaggtgtgcaccaccacacccagttaatttttgtattttagtagagacatggtttcactatgttgtccaggctggtctcaaactcttgacctcaggtgatccgcccgccttggcctcccaaagtgttgggattacaggcatgagccactgtgtctggcctctcttcttgtctttatctgcctcccactctagatctttcttggtccttgatttctttttttttttttttttttttttttttgagacaggatctcactctgtcacccaggctggagtgcagttacgcgatcatcacagctcactgcagcctcaatttcctgagctcaagcaaatcctcctgcctcagccatccaagtagctgggaccacaggcgcaccaccaccatgcctggctaattaaaaaaaaaaatgttgagaggccgggcgcggtggctcacgcctgtaatcccagcactttggaaagccgagatgggcagatcacctgcagtcaggagttcgaaaccagccatggctaacatggtgaaaccccatttctactaagaatacaaaaacttagctgggcatggtggtgcgcacctgtaatcccagctacttgggaggcggaggcaggagaatcacttgaacccaggaggcagatgttgccgtgagccgagatcgtgccattgcactccagcttgggcaacaagagcaaaactccatctcaaaaaaaaaaaaaaattggccaggcgcagtggctcatgcctataatcccagcactgtgggaggctgaggcaggccaatcacctgaagtcaggagttcaagaccagcctgaccaatttggtgaaaacccaactctgctaaaagtacaaaaaaaaaaaaatagccaggcatggtggcaggtgcctgtaatcccagcctctcgggaggctgaggcaggagaatcacttgaacctggctcactgcaatctctgccctagcctgggcgacagagtgaaactctgtctcaaaaaaaacaaaaattttgtttttaattctagatgacgtgttgatagatgcagcaaaccaccatggcatatgcatacctatgtaacaaacctgtacgttcagcacatgtatcccagaacttaaggtaaatttttttttttaattggaaaactgaaaaaaaaaaatattttttttttagagacgggatctggctatgttgcccaggctggtctccaactcctgggcttaagtgatcctcccatgttggcctcccaaagtgctgggattacaggtgtaagccaccacactaggctcttagctccttttcctgtttcacaccaccagctcatttcctctccactgcttccccctccctgccagcctctcccttccccctctacagcctccccacccctcactgccttcctctgtggagtgacctcaggccctcattggggccaaggagagactcccttccaacctaaacttctcccaaggtgctgggcaatctcagacccccttccctctccactccaggacaggagcctttcccaggacccggagggcaccaggaatgtggggcagagagcggggaggcagcctaagtccaggaagcgagaaccctcgcctcccccgagacttgtctccttccagcctctggtgcagacctcatgccaccccttactccctgtccctcctggggcctctgggccttaatttctcctctacaaaatgggcagactcgcctctgtcccacttagagtcccaggggagtgcatgctcacaaatgtccattgtatgattaatgtgcaggaattggagtttgtattaacaggagatgagagctgggagctgggactgggctctgagcctgtcccccacccccagtcacgtacagatgttccccatatttagggcaaaggaacagactggaagtagagacagcagagaatgtgtgtgattcactggcgactgtcatgatgagaccatgtgaggctatgggttagtgtgcaattgtgacacgatggtgtgtgtgaccctgtgtgcacctgtgtgactgtgcgtgactgtgggaggtgggattgcagggtgtgacaagtcactgtgacgtgcacagctatgggacagtgaggttgtgtgcgtgacatgtatatgactgtatgtgacttgtgaatatgggtgagactaagggagagttgtgagtctgtatgaccatgtcactcagtgtgaccgtgggggtgagggtgacggtgtgagagtgtttgcctcatgacagttggggaatgtgtgttgttggaatgtgactgaggactctgtgggtgactgtgaagtgtgtgagtgtgtgacggtgttaatgggtgtggttgcatgacattgtgtgtgactttcagcttgtgtcataaaaagactgtataataagacattaaaaaaaaaaaaggccaggcgcggtggctcatgcctgtaatcccagcactttgggaggccgagacgggtggatcacgagatcaggagatcgagaccatcctggctaacacggtgaaaccccgtctctactaaaaatacaaaaaattagccgggcatggtggcgggcacctgtactcccagctactcgggaggctgaagcaggagaatggcgtgaacctgggaggcgaggcttgcagtgagctgagatcacgccactgcactccagcctgagtgacacagcaagactctgtctcaaaaaaaaaaaagagtcgggcacagtggctcatgcctgtgattccagcactttgggaggctgaggcaggcagatcacctgaagtcaggaatttgagaccagcctggccaacatagtgaaaccccatctcttctaaaaaaaaaaaaaaaaaaaaaagccagccacagtggctcacgcctgtaatcccagcactttgggagactgaggcgggaggatcacgaggtcaggagttcaagaccagcctggccaacatggtgaaaacttgtctctactaaaaatacaaaaattagctgggcatggtggcgcgtgcctgtaatcccagctacccgggaggctgaggcaggataattgcttgaaccaggacccgggaggtggagattgcagtgagccaagatcacgccactgtactccagcctgggctacagagggagactcggccaaaaaaaaaaaaaaaattattagccgggcatggttgcgggcgcctgtaatcccagctacttgggaggctaagacaggagaactgcttgaacctgggaagcagaggttccagtgagctgagatcgtgccactgcactccagcctgggcgacagagtgagactccatcccaagaaagaaagagagaaagggagaaagggaggaagggaggggggaggggagaggggagaggggagaggaaaaggaaaggaaagtcctttgcagcaacacagatgcagctggaggccagtatcctaagtgaattaacaaaggaacagaaatccaaacaccagatgctcttacttataagtgggagctgagcactgggtacacatggacaccaacatgcgaacaacagacactggggactcctagagggggcagggaaggagacaagggttaaaaaactacccgttgggtgccatgctcactacctggatgatgggatcatttatacccccaacctccgcatcgtgcaatacacccccgtgacaaacctgcacatgtgccccctgaatctaaaataaaagttaaggccaggcgcggtggttcatacctgtaatcccagcactttgggaggccaaggcgggaggatcacttgaggccaggagttggagaacaatatggccaacatggtgaaacctcatctctactaaaaatataaaaatcagccaggcgtggtggcatacacctgtagtcccagctactctggtggttgaggcatgagaatcgcctgaacccaagaggcagaggttgccaagttggcgccactgcactccagcctgggtgacagagtgagaccctgtctagaaaaaataataaataaaatgaattaaaataaatgaataaataaataaataaaagttgaggctgggtgtgatggcacatccctgtagtcccagcactttgggaggccgaggcaggaggattgcttgaggccaagagttggagaccagcatggccaacatggtgaaaccccatctctactaaaaatacaaaaattttagctgggtgtggtggcacacacctgtagtcccagctactcgggaggctgaggcaggagaatctcctgaaccctggaggcggaggttgaagtgagccaagatggcgccactgcactccatcctgggtgacagagtgagaccctgtctcaaaaaaaaaaaagttgaaattattttttaataaaatggtggggcatggtggctcatgcccatagtcccagctagtcaagaggctgagttaagaggatcccttgagcccaggaagtggaggctgcagtgagctataattgttccagtgcactccactctcataaataaataaataaataaaatgtaaaaaggattgtatgggccgggtgtggtggctgtcgcctgtaatcccaccactttggaaggccaagacatgtggaacacctgaggtcaggagtttgagaccagcctgggcaacatggtgaaacaccgtctctactaaaaatacaaaaattagtcggttgtggtggtgtgtgcctggaatcccagctacttgggaggctgcggtgggagaattgcttgaacccaggaggcggaggttgcagtgagctgagatcatgcttctgtactccagcctcagcaacagaggaagactctgtctcaaaaaaaaaaaattctatgtctgcgagtaaccacacaactgcatactgcgtatatttatttcatgacaatccttccttgaacccctgctcttaacgattttggggacccagtggtgacccagatgtcctggctctaccctcctgggccacacaggctagcagggcaacagtgtttgtgatgaaacccggtgattgcgtgaatgtgtgggtgattgacagtgttgttggaactgtgagacactgtgagcgttactgtgtgtgtgcaggagtccatagccctgggtacatgactgtgtgtcacagtggatgactgtccacctgtgagtgagagactgtggctgtctgggtgtgaccatgggactgtatgggtgtgactgaatgtgtgactgtgtgagtaacagcttgtgaggttctgtgactgtgcctttccatggctcagcctatgggattgtgtgtgacactgcatgtttgattgagtgactgaggctctgggaatgagtggcggtgggggcgggtacctgtgggtgggacagcatgagagattgtacacacttggtgcaggggtcctcaggacgataaggacaattcagtaactgccctccctcatgaccttgatgactgccccctgctcggctctctgccccagagctccccgcttccgttccctgtcccgccttggccccgccccctcccatcaccccgggctgccagcgcctgtcacctctcccagagccgagacaaggcagttggaggcagcggtggcaggggctgcaggagcaagtgaccaggagcaggactggggacaggtgagggctccccaatcccagcccattctccctgcccccccttgacctctcaagtctctggcactctccctctctgcttctctgccctgcctttgtctctctgtctctgtgcccaccaccatctctgctcatctctgtctcttgatgtctctgtctgcgtgtttccatctctggttagctgctagataacttctctttcccctgctctgtctccctccacgtctctgcctcttctttgtctcctagcccacatctgcgtctctttctctgtttgtttttctctggtctctggctgggggtctcattctgtccctccgtctctgcgcctctcagtctttacatttctgtctcttgtgtctgtgacgccgttgtctgtccttctgaggctcgacctgagatcctctctgcttccgtctttctctacgtggagccgcgggggcgcgggtgagtgggtgtcgggcgttagaccgatttccaggcatctgcacatctaaccccggatctgtcgcttctctagtccctaagtatttggatgctgggaaagggttgttccacttactctgggctttatctacccccagcggggaaagttttgtaaggtcaggttcctatgtgtgctagaaaaccctttgggcttggagagtgggagctcggatgggcgtttcaagttctccaccaggctgtgggaactcagatgggcgtttcaagtaccccactagggggtactgaaaaccttcaagtttttcagttccccatagaaaaggggtctaggctgacggtttctaccccctcctctccaaggcggtccccgggttcccaggagtctgtaggtccagacttcggtgacactgacacttccgcccagcgtagctctagggcaaccgcccgctcagcaaacaccccccccttccacctttgctgccccaacaacagtcaggggaggccggggaatcacttaaggggccccgcccaccaccggagttccacccactccgcgtgcctctccctccccccagatcatcacgcctgggagttgcgggagcgggtgcgctgcctcggagtcccgcgtgtatacggctccccagccgtctgcccctgtgtgtgaatccctgaggcggggtgacgctggggttggagtaggagggcagaggtgctgaccttgccctgggaccctccaggcctgatcgcccctgcacgaaccagacccttcgccgccctcacgatgactacctctccgatcctgcagctgctgctgcggctctcactgtgcgggctgctgctccagagggcggaggtgaggaagcgaggagccagaggagctccaggcttggagggaggtatggggacggttttagggcttccgtcgtcagggcgctgtcgctcacgcctgtaatcccagcactttgggaggccgaagcgggtggatcacttgaggccaggagttcgagaccagcctggccaacatggtgaaactccctctctactaaaaaaaatacaaaaattagccgggcgtggtggcggccgcctgtaatcccagctactcggaaggctgaggcaggagaatcgcttgagcccgggaggcagaggttgcggtgagccgagatcgcgccactgcactctaacttgggtgacagagtgagactctgtctcggggtgggggggggaggcttccctcagcgcaaagagagtttcaagactgtcccgcttgcccagattcaagttgttgggtggtggtttgtttgtttgtttcgagacggagtctcactctgtcacccaggctgagatgcagtggcatgatctcggctcactacaacctccgtctcccgggttcaagcgattctcccgcctcagcctctcgagtagctgggactacaggcgcactccaccatgcctggctaatttttggatttttagtagagacggggatttcaccatgttggtcaggctggtctcgaactcctggcctcaagtgatccacccgcttcggcctcccaaagtgctgggattacaggcgtgagccaccgcgcccgggcccagattcgagttttgattatcgtttccactcccttttcttcccccaacaagtcctcctgataatttccagccaccccctccccaattttcttgaaggttttcagtctcccatagcaactccagtgggtggcttccaggcaccccaccccaagacttggaactggtttccaagctacccaagactcccgaacaacacgcaacagaccctcaaagtctctctggggcgcttctgggccacatggacctagcagcctgggagcgggggtcggtctgggggggtcctcccttctttcttttcctagacaggctctaaggggcagacggcgggggagctgtaccagcgctgggaacggtaccgcagggagtgccaggagaccttggcagccgcggaaccgccttcaggtgtgaccaggagggctggggacgcggggaggacctgaggctgagaggggtgggcttgggatgggccttgggctgacgggcggggaagaaatctcggggcgctgtgggctggagaggcccggggactgacctgagcatggtgggaactggggcgggaccacggttcctgggggaggcctgggaggaagcttgaaatgggaggagccttgggcggggcctgcacagaaataaaccttgaagggggcggggtttgggatggagactgggaagggcccttccgggtgggacgatctggggcggggacttgtttggtgggaggagcccagagtggggccgggaggaggggcggagctttgaggctggtgggaggagcttgtggccgagccgggacggaacgccctccgagtgggcggggctagagccgggcttggtgtggccggcggagaagcacttggcccactgcggagaagcacttggcccactgcgcagtagcacttggcccactgcgcagtaggtccactgggcacctggcccccgtgcccacccccaggcctcgcctgtaacgggtccttcgatatgtacgtctgctgggactatgctgcacccaatgccactgcccgtgcgtcctgcccctggtacctgccctggcaccaccatggtgaggtgctccctgggcccggagccctccccagacacaaacaactgctaacctttgcccccagacacctacatccgagtcccacagctcacctgcacccctctcctgctcctctttgccccctactcctttccggcaggctgggtttctcctgtctgtccaaccctgcctatctcacataacgcagcttctctgtctccgtatctctttctatttatttatttggagacggagtctcgctctatcgcccaggctggagtgcagtgggatgaactcggctcactgcaacttccgcctcccgggttcaagcgattctccagcctcagcctcccgagaagccgggattacagaagccgggattacaggcgcgcgccaccacacccggctttttttttatatatatatttttagtacagacagggtttcaccatgttggccaggctggtctcgaactcctaacctcaagtgatccgccggccttggcttcccaaagttctgggattacaggcatgagccaccgcgcccggccaccacaggattcttattttgtctccttttcctgagtctgtcagtctctgggcatcttaacctaactagctatgtcgcctcagacactttatttatttaacctatttttttctttttgagacagagtctggctctgtcacccatgtggtggcagcatcatagttcactgcagcctgggaactcctgggttgaagcgatcctcccgcctcagcctcccaaatagcagggactacaggcgcacgctaacacacccagctaattttttttaaaaaattggcagtgacagagtcttgccatgttacccaggctggtcttaaactcctggcctcaagggatcctctcacctcagcctcccaaagcgctgggattacaggcctatttaacttttgttgtttttgttgttgttgagacagagtctcgctttgttgcaaggctggaatgcagtggcgtgatctcggctcactgtaacctcacctcccgggttcaagcgattctcctgcctcagcctcctgagtagctgggactacaggcgcacgccaccacacccagctaatttttgtatttttagtagagacagggtttcaccatgttggccaggatggtctcgatctcttgaccttgtgatccacctgtcttggcctcccaaagtgctgggattacaggtgtgagccaccacgcccagccttaacattttgtacctcaattttcccatatgtagaactaggttaaggatattactaattccatgggctagtatgaatattaaattaatacaaataacatgccatataagggtttatcatcatcatcatcatcatcatcatcatcaccacttcggctctctccctctctgttattgtctcacagtttgtctttctgtatttatctctttctctgtgtgccttaattccctctcttctttccccacagtggctgcaggtttcgtcctccgccagtgtggcagtgatggccaatggggactttggagagaccatacacaatgtgagaacccagagaagaatgaggcctttctggtaagaagaggtgagggcttcaggttaggagtccagggagagatggaaaggcagtagattcaggcagggcctgaaaccccttggactgttcagacctctgggttgtaagtgagagaaactcaactcagacttgcttcaaagagagaaagatgtactgccttctgtgatggaaaagaataagatggccgggtggtgtggctcacgcctgtaatcccagcactttgggaggccaaggagggtggatcacttgaggtcaggagtttgagaccagcctggccaacatgtcaaaaccccgtctttactaaaaatacaaaaattagctgggcatggtggtatgcacctgtagtcccagctactcagagggctgagacatgagaattgcttgaacccaggaggcagaggttgcagtgagccaagatcgtgccactgcactccagcctgagtaacagagcgagactccatctcaaaaaaaaaaaaaaaaaaaaaaaagaatgctgtagttgggccaaggtcaatggctcatgcctataattccaacactttgagaagatgattgcttgaacgcaggattttgagaccagcctgggtaacatagtgaaactccatctctacaaaaaatataaaaatttggccaggagtggtggctcatgcctgtaatcccagcactttgggaggccaaggcgggcggatcacgaggtcaagagattgagaccattctggccaacatggtgaaaccccgtctctactaaaaatacaaaaattagctgggcatggtggcacgcacctgtagttccagctactctggaggctggggtgggaggatcgcttgggccctggggggcgaggctgcagggaaccatgatcctgccagagcactccagcctgggcaacaaagcaagaccatgtctcaaaaaaaaaaaaatctctggttggctggtcacatgcctcgtgccctggagctgaagggtggagtcagcccttctcaaataagggtaagcagttccccaagataaaatagggtatttgggcagaaacaaagagcagaggtccttccagtctctctctgggcctggggcttcgagccaagccttgttcccttccccttcttgccccgaccaggaccaaaggctcatcttggagcggttgcaggtcatgtacactgtcggctactccctgtctctcgccacactgctgctagccctgctcatcttgagtttgttcaggtgggaccttaaccctgagtggtggcggcagagatgtgagctcggcctcagtttgtccagtaagatggggtggtctgtttccaccaggtccagctatccactggtggttctatggggagcagtgggggtggttaaaggagctctgtgtggccgggagcggtggctgatgcctgtaatcccagctctttgggatgccaaggcaggaggatcgcttgagcccaggagtttgagatcaggctgggcaatatagtgaaaccttgtctctacgacaaataaaattagctaggcatactggtggtgcacctgtggtaccagctataggggggcgctgagacaggaggattgcttgagctcaggaggttgaggctgcagtgagccctgattgtgtcactgcattctagcctgggtgacagagtgagaccctgtttaaaaaaaaaaatagaactctgtgtggctgaggacagctctccaggggcccccacactgccttccaaattcccctaggcggctacattgcactagaaactatatccacatcaacctgttcacgtctttcatgctgcgagctgcggccattctcagccgagaccgtctgctacctcgacctggcccctaccttggggaccaggcccttgcgctgtggaaccaggtgggcatcctccttccgttcctccaaatgggaatcttgcttctctggtgggaccaggaagttctcagtccatttcctatctcctacactctccacagtttatctgagttgggagggtccctctccaaatgtgtcttggggtgggggatcaagacacatttggagagggaacctcccaactcggcctctgccatcatttaactctcccagcctatcactcccatactggaattttccgttcctctccctcattatttcacccatcattgaactttttcaccaatgagagaatccacctgctggcggtgaggcatggcaggatacgagaaagtaagtgggggtggggatgtggcaggtgccagtttgttactaggagacagggtgggagagactagagtctgggagcagacgtggtaagaactaacttgttgaaagttggaccataccaattgttaagaagccgcacgcacccaggcacagtggctcacatctgtaatcccagcactttgggaggccaagacgggcagatcacgaggccaggagttcaagatcagcctggccaatatggtgaaaccctgtctctactaaaaatacaaaaattagctgggtgtggtggcggacacctgtaatcccagctactcaggaggctgaggcagaagaattgcttgaacccaggagacagaggttgcagtgagctgagattgcgccactgcactccagcctgggtgacagagcaagactccatcgcaaaaaaaaaaaaaaaaaaaaagccatagcgtggcccggcagtggctcatgcctgtaatcccagcactttgggaggctgaggtgggcagatcgctttttgcccaggagttcaagaccagcctgggtaacatagcaaaaccccacctctacaaaaacatacaaaaattagccaggcatggcggccctcgcctgtactcccagctacttgggaggctgagatggtaggatcacttgagtccatcaggtcgaggctgcagtgagctgtgatgctgtgatagtgccagtgcaatctggcgaaagattgagaccctgtttcaaaaaaataaaatgaaataaaataaaataagaggggccaggcacagtggctcatgcctgtaatccaagcactttgggaggacgaggaaggcaggacacaaggtcaggagttcaagaccagcctgaccaacatagtgaaaccccgtctctactaaaaatacaaaaattagctgggcatggggcacatgcctgtagtcccagctactcaggaggctgaggtaggagaatcacttgaacctgggaggcagagattgcagtgagccgagatcgtgccattgcgctccagcctgggcgacagagcaaggctccgtctaaaaaaaaaaaaaaaaaaaagaggaagccatagggcaggagagtccataatgtgggtactggcagggagttcagttcttagaaggagctggggtgaccagtgacagaggtcacattttggggatctaggggggaactgacggcaatgatggaagataccaattattttttgttttgtttttgtttgttttgtttctttgagatggagtctcaaaaaagaagctgatttttttttttttttttttttttttgagacggagtctccctctgtcgctcaggctggagtgcagtggtgcaatctcggctcaccgcaacctccacctcccgggttcaagcgattctcctgcatcagcttcccgagtagctgggattacaggcgcctgccaccacacctggctaatttttgtatttttagcagagacagggtttcaccatgttggccaggctggtcaccaactcctgacttcaggtgatccgcccacctcggcctcctaaagtgctgggattacaggcgtgagccaccgcgccctaccagataccaattgttaaggggttcagagtgggagagtccatacagggaaagggaatagggtgagagaaaccaatcacagataccattcactggggacacagagtggaagaacctttgatggcaagagacggggtggaagggcgatcaaagctgggggagactgggagacacccgggcagcgctgactacccctctaccggtctggcccctccctaggccctcgctgcctgccgcacggcccagatcgtgacccagtactgcgtgggtgccaactacacgtggctgctggtggagggcgtctacctgcacagtctcctggtgctcgtgggaggctccgaggagggccacttccgctactacctgctcctcggctggggtgagctccgatcccgtcccccgcccaacccagcgcgcctctcctcggctcccccaactgccctgctggttggcctctgcgggtctcctcccgtctctaggcttctgccttccccaccccgacagaggaattccgcgggtcttgggcctggcggggcccgtgagcgcgctgacagctgcggcggggtgggggggcggggtcggggtctgcacaggggcccccgcgcttttcgtcattccctgggtgatcgtcaggtacctgtacgagaacacgcagtgagttgcagggtctggggcggggcgtgggaggtgggcggggctttgagggactgtggcgggttgtgatggacatgtgggcagggtcggaaggctattcggtgctggggatacgtgggcgggatccgaagtaatggggagctaggaaaggttgtgttccagggcaatcggcaaggggagggggtggggcctggatcgtaatgggcgggaccttagagaatgtgtgtggtctcaagtgcggtgggcggggcctagcgagcaaatgagcttggtgatcggtgagtctagagtttttctatctcttagctctactccgccttccccaggtgctgggagcgcaacgaagtcaaggccatttggtggattatacggacccccatcctcatgaccatcttggtaggatcggtcccgcctccaccaggccgccctcagggatttcccattctgggaagtgggctgccacctcctcctgccccttcagaatgggatcgcggctggctcagcccttatctctccccacagattaatttcctcatttttatccgcattcttggcattctcctgtccaagctgaggacacggcaaatgcgctgccgggattaccggctgaggtgagggcatgcgttggggaccgaggggaaggggccgggtgcgagatggggaaccagggctgcgggatcactgctgccgccctctctccccaggctggctcgctccacgctgacgctggtgcccctgctgggtgtccacgaggtggtgtttgctcccgtgacagaggaacaggcccggggcgccctgcgcttcgccaagctcggctttgagatcttcctcagctccttccaggtgctcaggcagggtgcaggggctccatccttccacccagggcctcctccccagaggggcacgaaagctacagtcgttctctggtgcagccactgaatggggtgggaagatgggatttagttcgttcattaattaattcattcttttttttttttgagacggattctcgccctgtcgcccaggctggagtacagtggcgcgatctcggttcattgcagcctctgactcccgggttcaagcgattctcctgcctcagcctctagagtagctgggattacaggaatgtgcgacaacacctggctaattttgtatttttagtagaggcggggtttcaccatgttggccaggctggtctccaactcctaaccttgggtagtccacccgcctcggcctcccaaagtgctgggattacaggcgtgagccatggcgcccagcccgttcattcattcgatacaaaatactgagctaggactgtcctgggctgtggggagcagcagggaccaggacaggagattggcggccccagcagtgctgcctgctagtgaagagtgagggcttcgaagctggacacagctgaggccaaattcaggttctgtcactttctagctgtttgccagctgtgtggccttcacctcagggttgagggtagggagaggtaagtgaggtgccaacgtgcagaatctaaggaaagattcattccaaaattgaaggcccaccttacacttgcttggtttacctgagtccccaacctgcttcacctcattcggcctgttttctcatctctaaagtggggaaaatactagtctcagtggacaaggctgttcattcattaaattcagcaaaaaattactgagcatgtgtatatgctaagcactcctccaggcttatcacaggaatacagccaagaaccaaatggtccctaccctccagtgggaaagacacactaaacacactatagaagtaaggcatacagctgggcgcagtggctcacacctgtaatcccagcattttgggaggccgaggcaggcggatcacctgaggtcaagagttcaagaccagcctgaccaatatggtgaaaccctgtctctactaaaaaaatagaaaaattagctggatgtggtggcggccgcctgtaatcccagctactcaggaggctgaggtcggagaatcgattgaacccgggaggtggaggttgcagtgagccgagatcacgccactgcactccagcctggccacagagggagatcatgtctcaagaaaaaaaaaaaaaaaaaggaaagcatatagaatgtcagatggtgagatgtgcctagagggagaataaagcaagaaaagagatgaggagtgtccactgagggatgggggttactgttttatttatttttatttttttagagatgaggtctccctctgttgtccaggctggatccagtgcaggggtgtgatcctagctcactgcagccttggactcctggtccaaagcaatcctcctgcttcagcctcctaagtggctgggagcacaggagcaagccatcacacttgactaatttttttttttttgagacagagtttcactcttgttgcccaggctgcagtgcaatggtgccatctcagctcactgaaacctctacttcccagattcgagcgattctcttgcctcagcctcccaagtagctgggattacaggtgcccactaccacgcctggctaagttttgtatttttagtagagatggggtttcaacatgttggccagactggtctcgaactcctgacctcaggtgatccgcccgcttcagcctcccaaagcgccgggattacaggtgtgagccaccgcgcctggccaagatcctcatctctaccaaaaataaaaaattagctgccgggcgcggtgcctcatgtctgtaatctcagcactttggaggccaaggaggccagtccagcgtgaccaacatggagaaaccctgtctctacttaaaatacaaaaattagcgaggctaggtggcacgtgcctgtaatcccagctattcaggaggctgaggcaggaacatcgcttgaacctgggaggcagaggttgcactgagctgagattgtgccactgcactccagcctgggaaacagaacaaggccctgtctcaaaaacaaaaaaaaaattaacttggtgtggtggtgcatgcctgtagtcttagccactctggaggctgaagtgggaggatccctctagctcaggagttgaggttgaagtgatgaagtgagccatgatcactccactgcactccagcctgggtgacagagccagaccctgtctcaaaaaacaaaaacaggctgggtgcgttggctcacgtctgtaatcctagcactttgggaggctgaggcgggcgtattgcctgagctcaggagtttgagacagcctgggcaacatggcaaaaattctgtctctactaaaaacacaaaaaattagctaggcgtgggggcgcatgcctgtaatcccaggtacttgggaggctgattcaggagaatcgcttgaacctgggaggccaagtttgcagtgagctgagatcgtgccactgcactccagcctgggcaacagagcaagactctgtctccctgtctccaaaaaaaaaaaaaaaaaaagcaaaaaacaaaacggcaacacaatcaccctaaattttcacaactactactatattactgctccattttccagatgaagaaactgaggcacagtgtggttaagcagcttgcccaaatgggaaagaaagtggaaaggtggtttttgagtccagggagcccacctccagggtccacagttcttaacccccagccagcagtgctcagctaaccttctggagcaagcagtggggttggtgtgggggaagccaggaaccagtgaaaagatgaccctaatagtttaggaccacggtggcggtagctgaggtgcttcagggcctggcaagggcgcgagcttattaagagaacagttacaaaggctaggcgcggtggctcatgcctgtaatctcagcactttgagaggctgagatgggtggatctccagaggtcaggagttcgagaccagtctggacaacaggatgaaaccccgtctctactaaaaatacaaaaattagctgggcgtggtggagggcgcctgtaatcccagctactcaggaggctgaagcaggataatcacttgaacccgggaggtagaggttgccgtttgccgagatcgtgccactgcactcccgcctgggcaacaagagcaatattccgactcttaaaaacaaacaaacaaacaaacaaacaaaaaacggggagggaggcgcggaggcggttacagtcctgcccccaccagcgatgtaacctccgcgcctcctctgggcagggcttcctggtcagcgtcctctactgcttcatcaacaaggaggtaggcagagacccggccgccgcccccgccctctggcggcagcgcggggtacggcgccgcctctgagcgccatcgtctcacaggtgcagtcggagatccgccgtggctggcaccactgccgcctgcgccgcagcctgggcgaggagcaacgccagctcccggagcgcgccttccgggccctgccctccggctccggcccgggcgaggtccccaccagccgcggcttgtcctcggggaccctcccagggcctgggaatgaggccagccgggagttggaaagttactgctagggggcgggatccccgtgtctgttcagttagcatggatttattgagtgccaactgcgtgccaggcccagtacggaggacgctggggaaatggtgaaggaaacagaaaaaaggtccctgcccttctggagatgacaactgagtggggaaaacagaccgtgaacacaaaacatcaagttccacacacgctatggaatggttatgaagggaagcgagaagggggcctagggtggtctgggaggcgtctccaaggaggtgacacttaagccatccccgaaagaggtgaaagagatcactttggggagagctggagaacaggattctaggcggaagcgatagcataggcaaaggcccttgggcaggaaggcgctcagccttggctggagtagaattaagtcagagccaacaggtggggagagacagagaagtgggcaggggcacccaagttgggatttcatttcaggtgcattggagattcttaggagtgtctcttgggggtaatattttattttttaaaaaatgaggatgtcactcttacccaggttggtcttgaactcctgggctcaagcaatcctcccaccacgggtctctcaaagtgctgggattacaggcgtgagccaccgcacccggcttttttttttttttttaaacggagtctcactctgtcacccaggctggagtgcagtggtgcaatttcagctcactgcaccctccacctcccgagttcaagcctcccgggtagctgggattacaggcaccgccaccatgcctggctaatttttgcattttcagtagagatagggtttctccatgttggccaggctggtctcgaactcctgacctcaagtgatccacccacctcagcctcccaaagtgctgggattacaggcataagccaccatgcccggcccaaatgggctaatgttttaaacagatccttcttgtctgccctgtaggaggacaaattatcaggggcaggggtggaagctggagcccagaaaggaggggactgcaggtgggaagtgatggtggctggaccaggatggaggccactgaggggtatgaagcagtcggatttgaagctgtttaaaaggtggaggtgagaggatttcatgaaggagcacatgaggacacagcagcagagaggactccttggctttggatggtggagagactaaagatagagagattgggttcgggtagggggagaaccacgtgtgctctttggaaaggttaggctggcagtgtttgtaggacatgacaggacactgagtgtaagggtctggagctctcaggagaggggcgagctggagatagtaatgtgagaggcactgggtcctgagagggtgatttggtgtggaccggagcacaggtgaggcaaggcaggcctcgcagctgaaactttatatccagagcagccagggccactgctggctgcggagtgaggacgcatatccccactgtccttagatgggtggcccctggaacctgggagaatgagggggcatgctgacagtctcattgtggctggaccacctgtacatacacccacaagaccctcacccctaaatcctccccctacacatatgcacacttaagttaccgtatgggtgttgtcgagcattttccctggggtctgtggctccctggaccgacatgccccaaagctgaactcagccttttcaagcttgcggccctgctgcccaattcccctacaccctgccttgtgggttctcgcggggtgggggccttagggcaaggctcttgtaaataaagtataagaaacagttgctttttttctttcttgggtagaagcatcttcttggcagtgtcacaaagggaaatgaccgaggcaggctgcctggtggagtaggggcccgtggtggctttactcaaatttatccatgtgttgctacaagaaaacgggacacctgctgccactgtccctcctaagagagtccccaagtggccatgttacatgtgatctgtgacatatacgatcagatgttacctgcatcctagggtcgcctggcatgcccatgagtgacgcttaggaccgtgcctggtgctggtgtgtggacaatgctgggccagtttgcccagggctatgcctgccacctctacttttatttcaccctctggaggcggacgcattggaaagcatgtggggcaggaggtgaggaaggaaattcagacaagctgagcagagcggccaggactggaatcttgggtgccaacccgcaaggtggggaaactgatttccatttcccagtaattacaggtcaataccacacctgagaaggcaggcaggaatggaacccagactgactccagggctgtgttgcttcctgtatcagaaccaaaccccgggtgacctcctgttgcatgccccttgtcccaactttatagattaggacactgcagctccatcttgctacccaagagttaagactttttctggaggacctggctccccgggtttggaaatagtaccattgtttcctaactgggtgaccccgagcaagttgcttaccctctcttggcttcaacgatctcatctataaaatgggatcacttaggtcgggcgtggtggctcacgcctgtaatcccagcactttgggaggccgaggcgggtggatcacaagatcaggagtttgagactagcctggccaacatggtgaaatcctgtctctactaaaaatacaaaaattagctgggcgtggtggcgggcgcctgtaatcccagctacttgggaggctgaggaagaactgtttgaacccgggaggtggaggttgcagtgagcagagatggtgccactgcactccagcctgtgggcaacagggtgagactccttctcaaaaaaaaaaaaaaaaaaaatagctctagtatccaccccacagatggttgtttccaattagatgtagtaaatgcacgcctttataaccccataacccattgccttctgtgtatcaggcctctctctgctgcagggtcccagctctgccacaatgctcacagtgtatctcaggctgtgcctttcttttttttgttttctttttcttttttttttttttgagacggagtctcactctgttgccaggctggagtgcagtggtgcgatctcggctcactgcaaccttcacctcccaggttcaagcgattctcccgcctcagccttccgagtagctgtgactacaggcgtgcaccaccacacccagctaatgtttgtatttttagtagagacacagtttcaccatgttagccaggatggtcttgatctcttgatctcgtgatccgcctgtcttggcctcccaaagtgttgggattacagggcgtgaggcaccacgcccggccccaggctgtgcctttcacagctcagagcagggcacacatctcactgagtgtgcactgacctcaggcctgcaaactcttgcaactttcaggtgtttgcctatatccagaggacagagacataggcagagacaaagatatggggggagggcccaacacagtggctcacacctgtaattccagcattttgggaggccgaggcaggaggatcacttgagcccaggagttcaagatcagcctgggtaacacagtgaaatcccatctctacaaaaagccggcaggaggatcaattgagcctgggcagtcaaggctacagtgagccatgatggtgctgctgcactccagcttggcagacagaatgacaccctgtctcaaaaaaaaaaaaaaacaacaaaaaacaaagatatggggagcacacgatgtgtgtgtcagagcaacacagggaatttccttaatccccccagtatataccacctccctttcccacctccatttatctccccaaatttgtcagagaattcctctcaagggtaatgcagttgaatctgaggggcagcagagctcaggggtgaagccacaggctctggaggtgagtttaaatcacagcaccaccacttcctggctggttgtccccgcaaagtgacattgcctctctgtgtctcagttccttcttctggaaaagggggataataaattaacaggcccgcgccagagctgttgggaggatgtttgaaaagcgctgagcctggcctggcacctaaacagctcagcaagtgttagccaggatcactagcagtaatatttagctactgactgctttcttttcttttctttcttcctttctttccttttttttgagaggtagtcttagaatctgttgcccaggctggagtgcagtggcgcgatctcagctcagtgcaacatccgtctcttggttcaagctattctcctgcttcagcctcccaggtagctgggaccgcaggcgtgcaccaccatgcctggctaattttgtatttttagtagagacagggtttcaccacgttggccaggctggtctcaaactcctgagctcaggtgatccacccgcctggcctcccaaagtgctgggattacaggtgtgagccactgcacccggcccttttttctgtttcttatctatttagtttagagatagtatcacactgtctataaaactcacaaccattctcccaggctagtcctaaacttctgggcttaagcaatgctctcacctcagccgctgtgctggtggcactgactgcgttcatcacctgtctaatcctcctgtctttcagggcagaccagaggctcctgggtacctggtgcccctgcactgcaacacagggctggacacacagggggcatttgggggatgtttgctgaaggaacaaacataaagaaaggctgaaagatacacatatataatttttgagatggagtctcactctgtcacccaggctacagtacagtggggccatctcagctcactgcaacctccatctccggggttcaagcaattctcctgccccagcctcctgagtagctgggattacaggtgcctgccaccatgccctgttaatttttgtatttttagtagagacggggtttcaccatgttggccaggctgatctcaaactcctgacctcaggtgatccacccgccttggcctcccaaagtgttgggattacaggtgtgagacaccacgcccggccagtttttgtatttttagtagagacagcgttttaccatgttggccaggctggtctcgaattcctgacctcaggtgatctgcccgcctccacctcccaaagtactgggattacaggtgtgagccaccatgcctggccccaaaagatactttggtcaagcgaggccaattcattataagaggtagagaagagagcaacagagtgacaaggagaagctcaggaagattaaagcaggagagctaaaatgttctccagagccacaactgggcgctcatttccatgcaaactgtttgctttgcagatggagaaagtgaggcctcgatggggcagagccagggcctctccacttgctcaggggtcctgctcccaccattcagtccgataccagctgcctcccccaagccctcctgaatccaccccactcccaaggctctggaaacagataccactagaaaaaaacacagagctttattattctcaacaccaatggcagcggtcttcataggacagaggagtgagttctgtcaacagacaggcggcccctacttgccggcgatgagcgggttccgcaggaccacgatgactgagtccccgcgcaggaacatcttggagatgtagcggtctttgttgactggcttggacttcttcttgcccttgccactcttgggtacctcagtccacatctccttcacgttctccagcaccatgttgcagtgcctggtggggaacagggaggggaggcactgggcgtgaggggcgtgcctctgacagtgccccctactgcctgctgctcgccccctccagcagcatggcttggggaagggtgcaggtgctaggccgggatgaccaagctgccaaagcaactctgccagtccttaggttgaggctgaggcaaaggactgcacctctctgtgccagtttgctcctttttaagagggaagataatcacgttaccttcctcacagggccattgaaaattatcattttcttttttgagacagaatctcactctgttgcccaggctgcaatgcagtggtgcgatttcagctcaccacaacctccgcctcctgggttcaggctattcttgtgcctcggccacctgagtagctgtgaatacaggcgtgcaccaccacgcctggcttttatatttttagtagagatggggtttcgccattttagctaagctggtcttgaactcctgacctcaggtgatctacccgccttgccttcccaaagtgctgggattacaggcatgagccaccacgcctggccatacaccccaggcttctgagacagctgtctttgagctcttcagactggagctggagtggcctctccaggcctgcggagaacacctcccaggacccagcactcacctatcgaaggccttcacgcggcccaggagtttcttattgttgcggcagttgatgagcacttgggtattgttcttgactgactgtgtgagcacagagagtggaccggtgttaaattcctcctcctctcgcttctgcagctcctctggggtcatctcactcttgggcttgttgaggaggctcctgcatggacaaacatggaaccaataagtgagagaggctggagttgagaggctggagctgtgaggatgggtgatcagggccttggcttcagtgtctccccaaccttgtcccaccacatctgtcctcctgttcagccttctgagtatcatcagctagatgcctaacagacattttttttttttttgagacggagtcttgatctgttgcccaggctggagcgcagtgatgtgatctcggctcactgcaacctctgcctcctgggttcaagcgattctcctgcctcagcctcctgaggagctgggactacaggcatgcaccacctccacgcccagctaatttttgtattttagtaaacagggggtttcaccatgttggccaggatggtcttgatttcttgaccttgtgatccacccgcctcgacctcccaaagtgctgagattataggcgtgagccaccgtgcccagccagacattttcaactctgcatgtctcaggtcgggatccagatcacccaaccacccaagcctaccctatctacagcgttccccatctgctttgatggtaactccatccttctagttctctgggcaaaaactcttttgtcaacttgattcctctttttccctcacatcctacatgaaatctgtaggaaatggccgtttcttaccatggcctaagcctctgtcatctctgtcctggaatctttctggtctctctgcctccacccacgttccctgacagtctgttctccacagagtggtctgagggggttgtgctaaaacctaaatcataacatgtcactcttcaaaaccctcccagggtatgggtacagtggctcatgcctgtaatcctagcactttaggaggtcaaggtggattgatcacttgatgtgaggagttcgagaccagcctggccaacatggtgaaaccccatttctactaaaaatacaaaacaaaacaaaacaaaacaacaataaaaaaaacaaccaacagaaaattagccaggcgtggtggtgcacgcctgtaatctcagctactcgggaggttaaagtagaagaattgcttgaactcagagagtcggaggttgcagtgaagtgagatcatgccactgcactccagcctgggtgacagagcgagactcttgtctcaaaaaataaataaatacaaattagaaaatacaaaaattaggccagatgcgatggctcacgcctgtaatcccagcactttgggaggccgacgcgaggtggatcgcctgagctcaggagttcgagaccacccagggcaagatggtgaaaccctgtctcttctaaaaatgcaaacaaattaaccaggtgtggtggcgcatccctctagtcccagctacttgggaggctgaggcagcagaaacgcttgagccccagcagcgaaggttgcagtgagccaagattgcgccactgcactccagcttgggctacagagtgagactccatctcaaaaaaaaaattaggccgggcgcggtggctcacgcctgtaatcccagcactttgggaggccgaggcgggcggatcacgaggtcaggagatcgagaccatcctggctaacacggtgaaaccccgtctctactgaaaatacaaaaaattagccgggcgaggtggcgggcgcctgtagtcccagctactcgggaggctgaggcaggagaatggcgtgaaccccagggggcggaggctgcagtgagccgagattgcgccactgcacgccagcctgggcgacagcgagactccgtctcaaaaaaaaaaaaaaaaaaaaaattagctgggcatggtggcgcatgcttgtaatcctagctactttgaaggctgaggcaggaagatcgcttgaacccaggagacagagctcgtgctactacactccaatctgggtgacagagcgagactccatctcaaacaaacaaaacaaaagaaaaccctcccatcctccccccatctcagtgtagaaagtaaaaccccgaccagacacggtggctcacacctgtaatcccagcactttggaaggtcgaggcgggtggatcatttgaggtcaggagtttgagaccagcttggccaacatggtgaaacctggtctctactaaaaatacgaaagttagctgggcatggtggtgggtgcctgtaatcctagctactcgggaggctgaggcaggagaatcgcttcaactcaggcggcggaggttgcagtgagctgagatcgcaccattgcactacagcctgagcaacagagcaaggctccgtctcaaaaaaaaaaaaaaaaagaaaaagagaaaaagatttttcttttcccttggggactagaggtttcattcactgatgtatcctatgtagcttaagcagtgtctgatacataagcattcaatgtaatatctgctgcactaataaatgcgcaaaatcatgtcaatgactcgttcgttatccgtgtaagttgtgaatcaagtcgaaaacgcacccgtctccagctcaaatgatcaagataagtcccttatttcaaataattatttctaaaagtcctaacttccctcccccattattcgttttatttcttttgtttcgttttgagatggagtcttactctgtcgctcaggctggaagtgcagtggcgcaatctcggctcactgcaacctccgcctcccgggttcaagcgatcctccggcctcagcctcccgaatagctgcaattacaggcgcccgccactacggccggctaatttttgtatttttgttagagacggggtttcaccacaatggccaggctggtctcaaactcctgacctcaggtgatccgcccgcctcggcctcccaaagtgctgggatttacaaacctgagccaccgcgctcggcctcccccagtattcgtaaaatcgctgccccttaacattcatttcaataggactaattatctaggaccactcccgttatcgtttaaaacatgtttttcataattaaatttttttttttttttgtagagacgggggtctcgctatgttgcctaggctagtctcgaactcctgtgttccagcgatgctccgccttggcctactaaagtgctgggatcacaggaatgagcccccgcgcccagcccagggcgttatctgataaagctgtcccctctcccgaagtcacgatgcgtcaaaggccccacgcccgttctcaaactcatcaggagaaaagcaggacgctgcatccctaaaacatctgcccctgccccccccgctctgctcaacccttcccacactcaatcggtcaaatatccaccctcaacctcattcccgccgcctaagcctagcccggcctcacatgatggtcactacgctctccgttcactcccgtttcctccgcgttgctgctgcctgaggagagagaggcgggacttcctcttcctgcgacccacttccgttggcgcctgcgcaaagccaaccagtaagtggaggcgtggcctgttgccacagcattccccaccaacggtgcacaatgatggaataaaagcttcgggtaggggttcgcggccagtcagaaccacacgggggcagatgtttatgacaatgaagacaaaaggaaaggcagtctgattcaaaccgtttcttgaagaatggtacaggttgaaggagggaaatgacaagctatttccaaatgcccgccggccgtgacttcgggggcgcggcctccgtgaagccaatccgctcctcgcttcggagacaggcaccgcccctcttccctctgggacgcgttactgacgtatctactgatctttccgaccctgcgccaccaatcccctgcctacatccggaaggggcatggacctgcgcccgggagatcgaatattttccatgatcaaacgctgttcattggctttccctcctccgctaaggcggagcctacttctcttgcgctcccatttgggtcgtgccattctcaggggaaccaaccccaatacctaagggaggctgggaggcgtgtcctcaggaccgtagttcttattggtttcgctgctcgctgtggggtgggctggtgcagccgcagctgttgcttattggcccaccgattccatggggaggaacttggctgggcctaaactcaatccgtggtctggtacaggtttcagggcaaagcggccatgcgttccgggggccgcgggcgaccccgcctgcggctgggggaacgtggcctcatggagccactcttgccgccgaagcgccgcctgctaccgcgggttcggctcttgcctctgttgctggcgctggccgtgggctcggcgttctacaccatttggagcggctggcaccgcaggactgaggagctgccgctgggccgggagctgcgggtgaggctgggcggggacccgggcaccgcggggaccctcattccctccccgctgttacccagggttgacgtggctttagcgtacggccctaaccgcagatgccaccgtcttcgtcatctgagcgcatgacccttaccaaaggaataaggcttcgggctggttctgcaacagtagcttccttttaagaggaaaggtctgaaatagtaagacgggggggttcagggttctacgcctttagtcaactatttggaagagtcccttcctccatctcccctctctctcactgggcctcgatttccccatcaagtttgaggtaggctggaccggatggtcttggaaggacttttcctgagccttggatttatcctagaagtctccgatgctggaggcggcagattaggaagagaacccggggctcctcgcgggtgacggcgcccggggtagggttgaaatgggggggttgctctcattcttcccttccctatcccacctccttcccaaggtcccattgatcggaagcctccccgaagcccggctgcggagggtggtgggacaactggatccacagcgtctctggagcacttatctgcgccccctgctggttgtgcgaaccccgggcagcccgggaaatctccaagtcagaaaggtaaagggacccacctccagtccctgaccccctagccctccagggaatgggaaataagaatcctgttcaagatcccaaagaagctaagaggaggaactggggctctgactggagttaatcggactctagactccatgctggtaacaaaccaccaggctgtactgccccccttaatgcccccaccaaaagcttactgtgtgctaggcataggcaacagacagccctataaggtgggtaccaatatgatcttcattatgcagatggggaaactgaggctcagagaggttatacacattgcacaaatcctacagataataagtagtagaccttagccgggtgcagtggctcatgcctgtaatcccagcactttgggaagccaaggtggaagaatcacctgagaagtttgagactagcctagtcaacctagtgagacccaatgtttagaaaatcatagacctagagttgaacccaaacaggttggctccgagctggtgctgtaatgtatctgttgtcttccagaaagcatgaagagtcatttaaaggccaggcgcagtggttcacacctctaatcccagcactttgggaggccgagacaggcagatccctcgagatcaggagtttgagaccagcctggccaacatggtgaaacctcatctctactaaaaatacaaaattagccaggcgtggtggtgggtacccgtagtcccagctacttgggaggctgaggcacgagaatcacttgaacccaggaggcggagactgcagtgagctgagattgcgccactgcaccccagcatgggtgacagagcgagactccatctcaaaaaaaaaaagtcacttaaatactgcctgagtcccaatgctacctcatccacttagattgtgaccttggactggtttcttttttattttattttattttattttattttgagatggagtctcacactgtcgcctgggttggagtgcagtggcgcgatctcggctcactgcaacctccacctcccaggttcaagcaaatctcatgcttcagcctcctgagtagctgggattacaggtgtgcaccaccatgcctggctaattttttgtatttttagtgagacggggtttcaccatattggccaggctggtctcaaactcctgaccttatgatccgcccacctcagcctcccaaagtgctgggattacaggcgtgagccaccgcgcccggcctggactagtttcttaacctctctgagcccatttcctcatctgtaaaatggggtcatgtattggcagtccctcccctaaatggttcctagaagagggcttagcacacagtgagagctatttaagggtaagctgtgatgagtcttgctggcttcaagaggtggggtctccccaacatctggcacccagtaggtactcaccagcactgtcaagggaatgattttaatcagagtagggggctgggcacagtggctcacatctgtaatcccaacactttgggatgctgaagcaggcagatcacttgaggtcaggagttcgaataccaggctggccaacattgtgaaaccccatctctactaaaaatacaaaaaatagccaggcgttgtagggggcgcctgtaaccccagctactcaggaggctgagtcaggagaatcacttgaagccaggaggcagaggttgcagtgagccaagatcaagccactgcactccagcctgggtgacagagcaagactccatctcaaaaaaaaaaagaaagaaagaaagaaatccattcaatcagagtggggctttagtgtcaacccatctgctctgcatggctcaggtcacgtggcccttctccccacctcctccccagtccccgtccaccctcccacctctctcttgccgctagttcctggaggccacgctgcggtccctgacagcaggttggcacgtggagctggatcccttcacagcctcaacacccctggggccagtggactttggcaatgtggtggccacactggacccaagggctgcccgtcacctcacccttgcctgccattatgactcgaagctcttcccacccggatcgaccccctttgtaggggccacggattcggctgtgccctgtgccctgctgctggagctggcccaagcacttgacctggagctgagcagggccaaaaaacaggtgaggagcaggagtcggggagggtagtgggctacctccaccttttcccaagcccccaccctcccttgcctggacatttgtcatccctctcgtcttcccactctactccacgcacagagccacagggatcttttttttttttttgagacggagtttcgctcttgttccccaggatggagtgcacatggcgagatcttggctccccgcaacctctgcctactgggttcaagcaattctcctcccaacctcaggtgatctgcccacctcggcctctcaaagtgctgggattacaggcgtgagccaccgcgcctggtcatcacagggatctttttaccttctagatgtcagattctctttcctctcccccaaaccctcccagggctcccgcctcattccagccataatccagagtccttatattggcccacgagctgtgccctgttacctctccagcctcatctcccacccctcacctcttgctcactctgctgtagccacccccacctcctctgggttcctcaaacccgcagagcttgctcccacctcagggcatctgcacttgctgtttgctttggatagaatgtgcttttctggccaggctccgtggctcacacttggaatcccagcactttgggaggttgaggtgggtggatcacaaggtcaggagttcaagaccagcctggccaacatgatgaaaccccatctctaccaaaaacacaaaaattagccaggcttggtggtgcacacctgtaaccccagctactcgggaggctgaagcagagaattgcttgaacccgggaggcggaggttgcagtgagccaaagttgcaccactgcactccagcctgggcaacagagcgagactccatctcaaaaaaaaaaaaaaattatctgggagtagtggcatgctacttgggaggctgagaggggaggatggcttgagtctaggagtttgagactgcagtgagccatgatcgtgccactgtattctagcctgggtgacagagaccttgtctcttaaaaaaaaaaaaaagaatatgcttttcatagatatcttcctggctggctcccactcttcactcaggtgtccactccaatgtcaccccttcaaagaggccttcccggccgggcgtggtaactcgcacctgtaatcccagcactttgggaggccgaggcaggcagatcatttgaggtcagaagttcgagcccagcttgtccaacagggaaacctcatctctactaaaaatacaaaaattagctgggtatggtggtacatacctgtaatcctactacttgggaggttgagacaggaggatcacttgaaactgagaggcggaggttgcagtgagccgagatcgcaccactgcactccagcctggatgacagagcgagattctgtctcaaaacaaacagaaaagaaaaacacaggccaggtgcggtggctcacacctgtaatcccagcactttgggaggccaaggcaggtggatcgtgaggtcaggagattgagaccatcctggctaacacagtgaaaccccgtctctactaaaaatacaaaaagttagctgggcgtggtggcgggcgcctgtagtcccagctacttgggaggctgaggcaggagaatggcgtgaactcgggaggcagagtttgcagtgagccgagatcgcgccactgtacgccagcctgggcgatacagcgagactccgtctcaaaaaaaaaaaaaagaaagaaaaaaaagaaaagaaaagaaaaacacagatttaatcatgctcctgccctgcttaacccctctctgtgcctccccagtgtccctataacaaagcccacactccttggcccttgctaaaccttccgtacccctctcaaacctctgggaccccttccctggccatagccttgccctgtgttgctcccttggctgggaatactcttcctcctgctccattttgccaggccagttcctacccattctcatggcaaacatcccttcccaaaagacccaacgccctctccaggccaggtcatcccccagcctccttcctatgccctctcaggactctatagttcttagaagcatttgtctcaactgcatttcactgtttgtataattattcatttgtggatctatctggttcaccaaactgagcttgaggaataataatcagagataacccttatttagttatatgccaggcactgttctaagacctggattcaaaccttaccctttgaaaagaactgttattgccgggcgcggtggctcacatctgtaatcccagcactttgggaggctgaggtaggtggatcatttgaggtcaggagttcgagaccagcctggccaacatggtgaaagcttgtctctactaaaaatacaaaaattagccaggcatgatagcgggaacctgtggtcacagctgtatgggaggctgaggcaggagaatctcttgaacctgggaggtagggggtggaggttgcagtgagtcaagattgcatcattccactccagcctgggtgacagagcaagatttattctaaaaaaaacaaaaaacaaaaaaaaaacaaaaaacctcttattaaccccatttatagatgaagaaactgatccttccagaagttagtaacttccccatgcctgctttgttatgaagcagccaagtacggatttgatcccagacaactgactcggaatctgtgctcttggctaccacgttctatgagtgaggacaccttatgtgttctcttaagcatgcaagcgggcaagaagtgtgggtatgttgaggctgagggctagtcctgagctggctctggccacccccctgctgctcccacaggcagccccggtgaccctgcaactgctcttcttggatggtgaagaggcgctgaaggagtggggacccaaggactccctttacggttcccggcacctggcccagctcatggagtctatacctcacagccccggccccaccaggatccaggctattgtaagaccagggtcccctggcttctggcgagggagggagcaggttaagcagggctggcgtcatcctgcacgggcccctccagtcctagcctttctccttaggagctctttatgcttcttgatctcctgggagcccccaatcccaccttctacagccacttccctcgcacggtccgctggttccatcggctgaggagcattggtaagggtgaatgcggaggtgggccccagcccacctggggtatggggtacagggcggtgggctggggtaggacaggcacctacactctaaaggctcatccaccagtctgggccacatagggagaccccatcttttttttttttttttttttgagatggagtctcgctctgtcactgagactggagtgcagtggcatgatcttggctcactgcaacctccacctcccaggttcaagccattctcctgcctcagcctcccgagtagctgggactacaggcgcatgccaccatgcccagctaatttttgtattttagtagagacagagtttcactatgttggccaagctggtcttgaactcctgacctcgtgatccgtccacctcagcctcccaaagtgctgggattacaggcgtgagccaccgtgcctggtgaccccatctcttaaaaaaaaattagctgggtgcagtggcatgcacctgtcatcccagctactggggagtatccttagagcctgggaggtcaaggctatagtgagccaagattgcgccactgcactccagcctgggcaacagaatgagatcctgtctcaaaaaaataaaaaataaaaataaaataaaggctgggcttggtggctcacacctgtaatcccagcactttgagaggcaggtggatcacttgagctcaggagtttcagaccagcttgggcaatatggcgaaaccctgtctctacaaaataaaaacaaacattaggccaggcgcgatggctcacacctgtaatcccagcactttgggaggccaaagcgggtggatcacctgaggttaggagtttgagaccagcctggccaacagggcgaaaccccatctctactaaaaatacaaaaagttagctgggcgtggtgacatgtgcctgtaatcctagctattcgggaggctgaagcaggagaatggcttgaacctgggaggcggaggttgcagtgagccgagatcacgccactgcactccagcctgggcaacagagcgagactccatctcaaaaaaaaaaaaaaaaaaaattagccaggcatggtggcacctgcctgcagtcccagtgacttgggaggctgaagtggtaggatcacttgagtctgggaggtcgaggctgcagtaagctgtgatcacaccactgcactccagcctggggacagagtgagactctgtctcaaaaaaaagtaataataaaaattaaaattaaaaaaattaaaaattgtttttaaaaataaaggcttggctgggcgcaatggttcacgcctgtaatcccaatactttgggagactaaggtaggtggatcacaaggtcaggagtttgagaccagcctggcgaatatggtaaaaccctatctctactaaaaatacaaaaattagctgggtgtggtagcgtgtgcctgtagtcctagctactccggaggctcaggcagaagaatcgcttgtacctgggagcacaggttgcagtgagctgaaattgtgccactgcactccagcctgggtgacagagcgagactctgtcactaaataaataaataaataaacaaataaataaataagaaaataaaataaaggctcacccagcctttcctctacctccctagcctttctaaggaactagagattagtaatagtgattaccagacaggggctctaaggtgagacagccgtggtttccaatcttaccagctggatgaacttggacaagtggcttcatttctttgagcctcagtttcctatctgtaaaacggccagtgggggccgggcctggtggctcatgcctgtaatcccagcactttgggaggccgaggtgggcgaatcacaaggtcagcagttcgagaccagcttggccaatatggtgaaaccccatctctactaataatacacaaattagctgggtgtggtggtgggcgcctgtactcccagctactcaggaggctgaggcaggagaattgcttgaacccgggaggcggaggttgcagtgagccgagattgtgctactgcactccagcctggcgacagagcaagactctgtctcaaaaaaaaaaaaaaaaaaaaggccggagggcccagacatagtggctcatgcctgtagtcccagaaatttgagtgaccaaggcaggaagatcacatgaacccagaagtttgaggccagcccgggcaacacaggaagatcccatttctacacacacgcgcacacacacacacacacacaattacccaggcatgggggcatgcgcctgaagtcctagctatttgggaggctgagactgaaggatcacttaggccagcgagattaaggctgcactgagctgggattgtcccactgcactccagtgtgggtgagagagcaagatctttttttttttttttggagacagaatcttactctgtcacccaggctggagtgcagtggtgcaatctcagctcactgcaacctccacctcccaggttcaagcaattctcctgcctcagcctcccaagtagctgggattacaggcgcccaccaccacacccagctaatttttgtatttttagtagagacagggtttcaccatgttggccaagctggtttcgaactcctgacctcaggtgatccacctgccttggtctccctaagtgctgggattacaggcatgagccaccacaccaggccacaagatcttgtctcaaaaaaaagaatgtctatgtcttagactctgagggattgaatgagaccaggaacatagtgagcccacaggaaggagtaactggcattcactcttgttgggctgaccagggctttgtctctgggtgctctgccttcctctgatttgtggactggggaccttcgactactaaggactaacccttcctctctaatcgcccccacttccagagaagcgtctgcaccgtttgaacctgctgcagtctcatccccaggaagtgatgtacttccaacccggggagccctttggctctgtggaagacgaccacatccccttcctccgcagaggtaccagctgcagggagggatggagggtgggtgtccaaggaagccacaaattggaactggccaagtccccttcccagggctggggaatggtgctaagtggccttaacctctttgtgctttgatttattcatctgtaaaatggggataatactccctatcttagagtattgttgaggggattgaacatgctaacaccggtaaagaccttacttggaccagcacccagcacatagcaagcattccagaaatgtttgcagctgggcacggtggttcacagctgtaatcccagcactttgggaggctgagcggggtggcggggggggatccttgagcccaggagtttgaaaccagcctgggcaacatggcataaatcttgtctttactaaaaatacaaaaaaattagccgggcatggtggttcacacctatagtcccagctactcgagaggctgaagtgggaggagcacttgggcctgggaagtcaaggctgcagtaagccttgattgagccactgcactctagcctggacaacagagggtgatgatatctcaaaaaaaaaaaaagtgccaggctgggcatggtggctcacacctgtaatcctagcacgttgggagcctgaggcgggcagatcacctgaggtcagtagtttgagaccagcctggccaacatgatgaaaccccatctctactaaaaatacaaaaattagacaggtgtcgtggtgcctgcctataatcccagctacccgggaggctaagacggtagaatcgctggaacctgggaggcagaggctgcagtgagccgagatcacgccactgcactccagcctgggcgacagagtgagactctgtctcaaaaaaaaaaaaaaagtgccagaacatagtatctttcaccagtgtgtggtggcaaggcaaggttacctagaggttgggcttgggctcctgggttgtggtgggctgcagtggacctgacaaagtctcctctgtcacttcaggggtacccgtgctccatctcatctccacgcccttccctgctgtctggcacacccctgcggacaccgaggtcaatctccacccacccacggtacacaacttgtgccgcattctcgctgtgttcctggctgaatacctggggctctagcgtgcttggccaatgactgtggagaggactgtgagagagaaggtcccagcgggggccagtgaagctcaggcaggatctgcctagggtgtgctggtttgtccttttcatacctttgtctcctaattgtgctacaattggaagaccttctttcttttgattgtctcaagctgccacccttcaaggacagggaagagaccactgtgggatgacagccagaggaataagaacttgctccctccccagaggtaaacacttggtccaaaggtttgcagggaccaaatactgttctttttttttttgagacggagtctcactgtgttgcccaggctggagtgcagtggtgcgatctcggctcactgcaaactccgcctcctgggttcacgccattctcctgcctcagcctcccaagtagctgggactacaggtgcccgccaccacgctggctaattttttgtatttttagtagagacggggtttcaccgtgttagccaggatggtctcgatctcctgaccttgtaatccgccagcctcggcctcccaaagtgctgggattacaggtgtgagccaccgcacctggcaaaatgctgttctttaagtcagcgaactgaaaaagtaaaagactgctgggtgtggtggctcacacctgtaatcccaacactttgagaggctgagggggaaggatcacccgaggtcaggagtttgagaccagcctggtcaacatggcgaaaccctgtctctactaaaaatacaataattagctgggcatggtggtgggcgcctgtaatctcagctgcttgggaggctgaggcaggagaatcacttgtacgcaggaggcggaggttgcagtgagccaagatcacaccactgcactccagcctgggcaacagagcgagactccatctcaataaataaataaataaataaatattttttaaaaagagtaaaagactaaaagactattactggtctggcccagtgatgccacccagctagatgaattctctgtggtttgtgttgtgtcagttcattctccagaacagcagccttgctactgcaccagtcctaacctaactcccacacggggcacacagaggatgtcctcataaccaggcacagaggagacagaagctcatattttggaagtccagattcttccagacccagtgggtaataagccattgtttctggctgggcatggtggttcacacctgtaatcccagctctttgggagtcagaggcagagggatagcttgagctcaggagtttgagaccagcctgggcaacagagcatgaccccattctccagaaaaaagaaagaaaaaaaaaagcgtaaccaatgtttctgcaaaacaccacctgcataagccaggtgtggtggtgcacaccctgtagtctcagctattcaggaggctgaggtgagagaatcccatgaacccaagagttcaagaccagcctgggcaacacagtgacaccctgtctcaaaacaaacaccaccaccaccaacaacaacaaaaaaggccattctgtagaactcgtgtaaatagacattgcatgacaagggggatctgaaatccaagaagagggtgagacaacataaaatgagtttcctcactgcatcatgtgaatttttaagacagaacccagaggctcccaaagtatttcactatggaacactttttattgggaagcacttcatagaactaggatacttcggccgggcatggtgggtcacacctgaaatcccagcactttgggaggccgaggccagcagttcagctgagctcaggagttcgagagcagcctggacaacatgatgaaaccccatctctactaaaaatacaaaaattagccaggtgtggtggcatgagcctgtaatcccagctacttgggaggctgaaacaggagaattgttggaacctggtggcagaggctacagtgagccaaaatcacgccactgcactccagcctgggcaatagagcgaggctgtctcaacaaacaaacaaaatacaacaacaacaaaaagaactaggatacctcagaaggtactttggaaaacatggggttttgaaagtctgagagcatctatgagaggaatgggtaagacagatctagatttaccgcagagtagttagggcacactgtctttccccttcagctgttggtacagcactgtgagatggcagtgtaactgcaaactccaatgagcaagtatttcccaaccctacctaattttcagactcagctggggtgctcattaaaaaatgcagactgggtgcagtggctcatggctgcaatctcagcactttgagaggttgaagtgggaggatcacttgagcccaggaggtttttctttttgaggcggagtctcgctctgtcacccaggctggagcgcagtgctgcaatgctggctcactgcaacctccgcctcccgggtacgagcgattctcccgcctcagtctcccaaatagctaggactacaggtgcgtgccaccacgcctggctaatgtttgtatttttagtagagacagggtttcaccgtgttagccaagatggtctcgatctcctgacctcgtgatccgcctgtctcggcctcccaaaatgctgggattacaggcgtgagccaccgtgcctggcccacgctgtccttaaggagacactttggtgcatacacagctgctcagcaaaccgactcaaaagaaaaacctgagacagatggcacctggaagcagtcctacgctgtgtaggtgagcatctgccctccaaatcagctccagggctgaaactcggggtatcaaatgagaggataaacataggtcctcaatttaggttcttccacattcgctgacatttattgagcatctactatgtgccaggcatcatgagaacttttttttttttttaagatggagtttcgctcttgtcacccaggctggagttgcagtggcacaatctcggctcactgcaacctccacctcctgggttcaagcgattcttcttcatcagcctctggagtagctgattacaggcatgtgctaccatgcccagctaatttttgtattttcttggtttgggggagagagtcttactctgtcgcccaggctggagtacaatggcgagatctcagctcactacaaactccacctcctgggttcaagcgattctcctgcctcaatctcccaagtagctgggaatacaggcacctgccaccatgccctgctaatttttgtactttttagtagagatgggaccatgttgatcaggttggtcttgaactcctaacctcaggtgatccacctgcctcggcctcccacagtgctgagattacaggcatcgagccaccatgcctggccaatttttgcatatttagtagagatgagttttgccatgttggccaggctggtcttgaactcctgacctcaggtgtccacccgccttggcctcccaaagtgctgagattacaggcgtgagccaccgtgcccagcccatgagaactttttttttttacatatacaaaactatgtagtctccctgactacaaatcctgaaataggtacaatttcagttctcattttgcaggtgaggtggctgagactgagaattgcaaacgagttgtgtatggtgtgcaaattttcactcacagctgtgctcgcaacccccatgtcctatctcccttccaaaaagtacctgtggctgggtgcggtcactcacccctgtaatcccagtcctttggaaggttgaggcaggaggactgtttgagcccagaagttcccgaccagcctgggcaacaaagaccctgtctctacaaaaaaaattaaaattagctagtatggtgcctgtggtcccagctacttgggaggctgaggcaggaggatctcccgagcccaggagtttgaggttacagtcagctatgattgtgtcactgcactccggcctgggtgacagaatgagaccctgtctcaaaaaaataaaaataaaaataccccaaatacacccccaccactaccaaaaaaaaaaatacacttgtgccagatgaaatttgttaagaaaaagtatccatagaattttaactttaatctgctttatgcagatttttggcttgaatctggggtaagaactgttagccctgttgtacagatgaggctgctggtgcctggcaagttcccgcagccagcaaacccttttatcttttttttttttttttctagacagagtctcgctctgtcgctcaggctggagtgcagtggcacgacctcagttcagtgcaacctctggctcccgggctcaagcaattcttctgcctcagcctcccgagtagctgggactacagccacacgccaccacgcccggctgatttttgtatttttagtagagacagggtttcactgtattggccaggctggtctcaaattcctgatgtcacaatccaccgcctcggcctcccgaagtgctgagattacaggcatgagccactgtgcccagccttgcatttttcatttgtaaaagttatgtcagtgggttttttttccctttcctacctactaggccattttgatttttttttttttttttttttttagttttggcttccttgctgataattccaagcttttaaaatttttaaacagtttaaaataaattttgtattataatctgtgattgacagtttcatcatgtgaagcctatgtgggtgtttttgttgtttctgctggttcttattcatattatttccatttgtttggttatttgtgtactactcattacctgaaaaattatttgtggtgggctgggtgcggtggctcacacctgtaatcccaacactttgggagaccaaggcgggcagactgcttgaggtcaagagttcaagaccagcctggccaacatggtgaaaccccatctctaccaaaaaaaaaaaaaaaaaaaaaaaaaaattgctgggcgtggtggtgggtccctgtaatcccagctacttgggaagcctaggcagtagaatcgcttgaaccggggaggcggaggttgcagtgagctgagattgtgccactgcaccgtagcctaggcaacagtgagactccatatccaaaaaaaaaaaaaaaaaaaaaaaaaaagccaggcgtggtggctcacacctgtaatcccagcactttgggaggccaaggtgggtcaggagttcaagaccagactggccaacatggtgaaaccttgtctctactaaaaatacaaaaaattagccaggtgtggtggtgcgcacctgtagttccagctacttggcaggtgaggcaggagaatcacttgaacccaggaagcagaggttgcagtgtgccgagatcgcgccactgcgctccagcctgggcaacaagagcgaaactgcatctcaaaacaaacaaacaaaaatatttgtggggcttctagatgacagttccttccacaggtggacttgtgtttgtttctgccagacatgtcagctagaagtaccctgtatcacacaggacgtgaacctggctgcgaacctgtgccgagggccagtctgtgaccacagattatcagaatctttctttttttttcatttgatttctgcctcttgaatacctcttcagtcttccgggtcatccttacctgagcttgtagctctctggaatcccagttcctgcagttgctcactgtgggctggctttggacttgacttttgcctgctccttccagtaaggctgccaagtaggaaaccccagtgtgtccacatcagcaaacaccctgagagcaaatgtggcttcagagccccacatatcattcttttttttttttttttttttttgaggcggattcttgctctgtctcccaggctggagtgcagtggcgcaatctcggctcactgtaagctccgctccccgggttcacgccattcccctgcctcagcctcccgagtagctgggactacaggtacccaccactacacccggctgattttttgtatttttagtagagatggggtttcactgtgttagccaggatgatctcgaaccgcccgccttggcctcccaaagtgcttgggattacaggagtgagccaccgcgcccggctcccacatatcattctcttaactatttggcgtggtgggtctttactgtattttattggctatttgatcctttgaagggcatttttttttcagttgttctcaacaggaaggtccgaataatctaactcaccctccccacaagattcaaacccaggtcttattgattctaaaatctaagcattgaatcactaccataatgtatcctagtcctctggaaattctgatttccggagaagaatgtcagagacttagctgcctctcaatatccatttttcccttcctttaaactgaaaatttaagatatccagctgggcgtggtggctcatccctgtaatcccagcactttgggaaactgagatgggtggattactggaggccacgagttcgacagcagcctagacaacgtggtgaaaccccgtctctactaaaatacaaaaattagccagctgtggtggcgagtacctgtaatcccagctactcaggaggctgaggcaggagaatcatttgagcccgggaggcagaggttgcagtgagccgagatcacaccactgcaccccagcctgggtgacagattgagactgtctcaaataaataaataaaaaattaagtggctatttaaaaactttaattacagggatttttagtaaagagtgttttgttgggcatattgcacccagctaaaagactgcatttcctagactcatgcagcccttctgtggctaagtctgacgggtgagatgtatatagaagcatagtgtagtgcttctgggaggaagggggcctcccttccagcaaaatggtgatagtaaaagcaatataatcttggctgggcatggtggctcactcctgcaatcccagcactttgggaggccgaggcgggcggatcacgaggtcaggagatcgagaccatcccggctaaaacggtgaaaccccgtctctactaaaaatacaaaaaattagccgggcgtagtggcgggcgcctgtagtcccagctacttgggaggctgaggcaggagaatggcgtgaacccgggaggcagagcttgcagtgagccgagatcccgccactgcactccagcctgggcgacagagtgagactccgactcaaaaaaaaaaaaaaaaaaaatttaaaaattagctgggtatgtggcgtacacctgtagaaaacccagctgcttggcaggttgaggtgggaggtttccttgagcccaggaggttgctgcagtgagctgtgatcataccactgcactccagcctgggtgacagagagagaccctgtctctaagggaaaaaaaaaaaaaaaaaaatcttgttcaagctactactattttgagatttttcaaatccaaattgacacagatgagaagagtaaaaaataatctcaggctaagggacttggctagggatcccttctctttccactttttccatcccccatacacaggcctacaactcccctctcttcccaaaccctcccttcacaacacacaaaccagtctgcacacagccttataaatattgattttatagaaaggaccaattcaaaattggtcagatgccacacgctagaagcttccagaaccacgatggaaagaaaaaaaagaaaacaaaaaacagagagaacaaacaaaaataccccagaccaaaatgcctgaaaaatcaaggtcctggttgaccaaaggattcttaaagaaacatgtggctggggtgaggagaccccaatgcctgaacgagaccccagagtggaaggaaaaacaacccagaaatgcaaatccgaagtccctgcccacggggcccccccacgctgtcaaaagcgaggcaaagggcttcacagctttatgggggtggggttgatggcagtagcttaaataataacgggaggaggagggtttttatacttcagctttttttttgtctgcccccctcttcctctacgcggaagaggagagactggtagcttgaggttaaggagaaaacagtatttcccccccacttctttaataggcaaaccatctagaaatggactgtcataaaaaaatgccagatcccacctgtgacctgacagcccccaattcctagagaggtgagagctgtcgtgtggcaggttaggagaggtgccaaccttgggcgatgcggcttcttgggaaataacagctccagcgagaaagaattggggtgagggagaggatgggggccagaatggggggacccttaagtggtaccaaaattagctgccgtctgctccctgctggtgggtccttggggtggaaagcatggcagggagggggttggggctgaatggagaagaaagtgagatgctgataaaaaaaaaaaaaacacccttctcagagggtccacggccctggttctgaagagtagaaaatcaacaggatcaagcagagggctttcctgggtcacccctgctgaaccccagctcagttccggtgagggatcaatgctgcctggagtaggggaatgggcaggcggcccagtccggaccctcggctcccggggggagaggggaggggtgggcgtggtgggctctcccctcccctcccccggcttcacctcccctcctcccggccggcccggcccccgcctggcccattgcagggcagcacccagttgttatcgtggaggcccaggcggcagccgggagtctcgcggtcggctcgacggcagcacatccagtaggaacgtccgtaaggcaggtcatggtggtagggcttggggtgccagcggcagagcgacacgtcgcccttctcgtatctcttgcggcactgtttgcacggatcatcgcggtagagcgggtctcggctccagcgcgagtctgtggcccgcacgccaaacgcctcgatgatgcccttgaagtggtggcaggtgcacttgagggcggccagcgcgcgcgtgggcaggaagctgaagatcttgaccagcacgtgctcgggcagcagcagcatgtactgtcgcggctccagcagccgctgaatcttgaagcggatctctaggaagtcgtgcgacacgtgccggtacaagcggcacagggaggtgtccgccgtgccctcggcatcgtctgggccgggcgcagtggccggggagtcggccgggggtggctccgggggcccgtccggcccgcggttctggagaaagaagagctggcccggaggcggcggttcctccgggctgaccgtcaggcacacagtctcctccttcacgttcttggtgccgtccttgccaaagaagatgcactcatctaccacgcccgtcaccaccacgtccacgtggaagcctgacgctccgcagtcccgggcagggggcggagggggcgccgggggagtgtcctcaggcctggcgggtgccgggctgtcaccctcactggcctcatccgccctggccagcaggaactccacgttgctggggagggcatcccgcgaggggctgatgagctggtataagtcacatgtgatcttgtccttggctcgggccccaggacctgggctgccagggtaggcacaaccaggcctgcccccgcccccactgggcaggccgctgtctggtgcacggggctcccggccgttggagatgcggaaggcgatgcgcacctccccagggcctggcccgggccgctcttccttgcggaggcccttggtgggagggctgtccctctgcgcttcaaagtgggccacggcctcggctacacggctgcagtccccaccaccggaccgccgttcagatcccacccccttggccggtccaccttgctcggcggacacaaagactacaggcgctggggtggtcggtcgtgggtagctctgcagggccagggctgcccgctgttccaccagggccaccatctcggccacagagagcaggtccacgtcctcaccggctgaggcggggccctcctcagcagcaggggggccctcccggccccctgggtcaggaggagccttggtggggtcaagacagcgcctccgccgcttggccttggagctatcgctgccccagtgccccttgaccttcatggagctggcccggctgcccccaccacactggtgggccacaaagaaggccaccttctcctttgtattcccgggcttgatgacataccacgtgtccaggaggactcgaccctcatcaccagcagctgctgctgagaggagcggagccggctgggaggcagggacctcagtggccaaggcgggtggtgtgttctctgagtgggcaggcccatggtctggctcggccccgccaccaggctcagggcaggctgatggcttgagggccgcagaaggcgggcgtggctggttctgtgagtaggtgccaaagggccgggggcaccatagctggaagggcaggaggctcccacggtccatgctgggggatgatggcagacaggctgggcttcagcgcatctcaggacctaggtggtggtgggaggctccacatgccacctggagacacgaagaggaggttggggagctagggggacagcctttcttcccaggaccaccccaacctccacctctccttagaccaaaccagaccatcaagaactctattcctggctgggcgcggtggctcacgcctgtaatcccagcactttgggaggctgaggtgggcagatcacctgaggtcaggagtttgagaccagcctggccaacatggtgataccccatctctactaaaaatacaaaaatgtgctgggcgtgatagtccacgcctgtaatccaagctacttgggaggctgaggcacgagaatcgcttgaacctgggaggtggaggttgcagcgagaccagatggcaccattacactccagcctgggcgacaagagcgaaactccgtctcaaaaaaaaaaaaaaaaaaaaaaagaactctattcccactgccatgctcaggtgagcagacagaggttgcagaggggatgagagatgcccttttaacttgcagagcgggaccctaactggcagcacgcaccaaccccataggtcctaccccactgtccaactgcctttgcccacaatccagaggcctttaaactgccataacttttacacttaagtgaaaggaccactgacagacaaggtcctttttctatttgctcactcagtagctcgttcctgaaaagacagaaattcccagccccacccacagctatggctgcttaaacccacagagagaggaacgaaatgcgctgggatggggatgaaaatctgaggtcagattcagacaagcacttaagaaatcggcttttctttttttttttcaggtagtggggcttaatgagaatttattaaagctgtgtgtcctcagtcagaaaaatgcacacccttgcaaagacagtacaggggattccctaaagcacagccgtggacccgcggagtaagagggcctgttctagagcctaggaggagttccaggctgcagggagcaatgatggcaccactgcactccaacccgggtgacagagtgagaccctctaaaaaacagagaacaaagccgggtgtggtggcttgtgcctgtaatcttagcactttgggaggccgaggtgggcagattgcttgagcccaggagtttgagaccagcctgggcaaaatccatctctacgaaaaaagatacaaaaattagccgggtggggtgtggcgcacctgtagtcccagctagttgggaggctgaggtgggagtatcgcttgagcccaggaggtggaggctgcagtgagctgtgatgctgtgatcataccactgcactccagcctgggtgactgagagagaacccatcttgggaaaaaaaaagaaagaaaacacgagggtgcctgttctagcctagctttctcctcaagctgcacacagataaacagaggctcagagtggggaagggtgacatagctaagattacagtgggtccggagcaaaaagaggctctcaacttgatttctggactcttcaatttagggctctgttaatgactattttattttggaatgacttgatgtgaatgacctaatctggaggcaatcttgcgcatgagtccgacatgatcactttcactgcagtttgaacctactaagtaacatatgcctcaatctttctctggctcatctccctccagacagctcaaaaccaaaatgaccctttaaaccttgaaacttccacatgcctacaggccagagaggtcagcaaactatggcccagaagcctaatccagctcgctgtctttgtaaataaagttttattgaaacatgctcatttgtttatggatgctttcatcttcaacagcagagctgaatagcagaacaaagaccacatggcctgcaaagcttaaaatacccattatctggctctttatggaaaaagtttgccaactcctgcagtacagaccatccctctaaattcaaacaattccaggcctggcacagtggctcacacctgtaatcccagcactttgggaggccgaggcaggcggatcatctgatgtcaggaattcgagatcagcctggctaacatggcaaaaccccgtctctactaaaaatacaaaaattagccaggcgtggtggtgcgcgcctgtagtcccatctactcaggaggctgaggcaggagaatagcttgaaccgggaggcggaggttgcagtgaactgagatcttgccactgcactccagcctgggcgacaagagctaaactccatctcaaaaaaaaaaaaaaaaaaaagaaagaaaacaaaacaaaatccagacagcctccaagcactcacaggtaccagtaaacacagagaatccccatgtcaagaatctttatctccactccataatccccaatcccacctacccctcaaatacttacagtccctgctgtaatctcagctcagtgttaaaaatatcactccacagcctccaaaacctatagatggctgtttaccaaccaccaattcacatacatgttgagtatctcaaatctgaaaatccaaaatgctcccaaattcagaactttttgagtgccaagatgacactgataggatatgctcattagagcatttcagatttttcagacttggcatactcaactgataagtataatgcaaatactcaaaatccgaagaaatccaaaatccgaaacactttttagtcccaagattttcgggtaagggatacttgacctgtataaccaactgcccagggaggcaggctaacacagcaaaagccagtctctacagatgccatcctgctacaacctggccaccccctcaagtcccctaatcagttccaaccttacccccagcatctcaatgtcctcccccaaatatcgaaaagctttcaaatactactttaaaccaccgaacctaaaaatatcctctccagcactgaagggccgaatctcagtcaatctctcacagatcccaacacagcaattccccaaactatgtcataaacaatcactctcccggaatcctatactccccccaaccctcctccattatctcccaattccactagaagcctccaacagcagacgaactctttgaaaacacaaaagctccctaacactttaagatgaatcttaaaccataaaaatgtttcacaaagccaaaaaaaaaaaacaaagaaacctcacaaatgttacaatagcagacatgtgcttactgcacgctcgctgcgagcttactaggtaggtactgcgctaacaattcctaatcctcctcggtccctaggaagcaggtagtgttattaatgcctagttcccgatgagacacaggtgaaatctcctgtccgggttaagacaggtaggaagtcaagacgcgagcccagacattccacctccaggactggtactctcgggctctttgcttctgtctctccgggagctccccaaattctatgcccaacaaacactccaaaacacaaagggaacccgatcccgaaaacacaaccgaaccttccgcattacaaacgaacccaaactccaaggtgccccttaagcgcgagagaaccccaaaagtatcccctaaacccacgttaaaacttccccaagccccagaacattttgcaaatggaaaaggaacccccaaatcttgtaaccgcccccccaaagaaatcttccaaacccctcaggtgaccctcgaaacctacacacgcccccaaagagccctcacccgcagcccccccaggcggcgggagaaggctgcagcccacacgcatgcgcgcgaaaggtaaaagggcccgccccctcgctccttccctccggccaccgcgcgggcagactagcaactagcttccctccgcccttttgttgacagacgcgcgcgtgacgctctcagccaatgagcggccgccattcggggccgtgcccatataaggcaggccttggcgaaggggcccaacttcgaaatagggaggagtaggcgagaggtgatgggagtgggtggtggggtagacacagccggatgcaagggagcgtggaacaactcccaacgtccagctaaacggaacaaggtcagggcaaaggccacgacactccaggggaggcttattacaccacgtcccctcgaacagaagccctgattgacgcttgagacttaaagggccaggcagcccggggattaagaacaccaaggcggaaggaagcaggcggagagatcagagtatccagctttggttgggaactgtgggggcggggggcgggctgaggatttccgcggggggaattgggcatcgggataaccccaccctgaaaaacaaatggacagaaccctacgaaggttcccacggcaactgaaaacaagcctctaggcctggcgttcaaggctcaagccgtgtagccattcggagctgccagttcagcctttccaaacaggcgccccaaacctgcctcacttagtacaaaagagcagccagaaaagtcctgttaaagcacagtcctataaacctgaacccgtccctatcctggtgagaacctgccatggctccccagtgccctctggaaaacacccaggtaccccacctgtccagtcgcatccctccccactcctccgccccgcaggcaataccccagtgcaccctggtgggcacctgatctggcatacatagaatactcaggacccatctgatccccggtaggagtgatcgtctccacggtatggatgaagaaactgacgcagggcaggtctcctgaccacaaggtcacacagagctggagtgtgagctggagcagggatatgaagccagggaatctgatttcctagtcactgtgccctactgtttcactatatattccctggggtttcagctcgaccacccctcctctaagaagctgacacccccaatccccctaggccaggtcaggcttcacccagggcgtccatgcggtgggctcattgctgtctattcctcaaagttaccgggctcttgccttccctggtctctgcatttgctgttcccaccaactgcaatacattccccctctgcaaggctcaattccttacttcattcaggtctgtgttcaaatgcagttttattagagaggccttctccaactcccttcctggaaatcacccacctgcccagaggggacctctgggttccctcttccctgcctactctgggtcatcgtctggggtgggtctctctccaggcctgagacaggatcttctaactcccccacactgagcccagcataaggccctacactaggtcagccttcagcaactactccatgaaaatctattcattgtaaaacattgtgaaccaaaaatatggaaaatcaaaagacggcaaaaaactggctgggaaaacacgaaccaagagacaagtagaggagtaacattaccccttaaaaaaaaaaaaaaaaaaacttggccaggcacggtggctcacacctgtaatcccagcactttgggaggcagaggggggacacaatcccttgagctcaggagtctgcgaccagcctgggcaacatggtgaaaccccatcactacaaaaaatacacaaattagcagggtgtggtggcacgtgcctgtagtcccaagtactcaggaggctgaggtgggaggattgcttgagcccaggaggtagaggctgcagtgagctcagatcaggccactgcactccactctgggtgacagcacgagactgtcttaaattaaattaaaaataaattaaataaataaaaaataaataaactgacaaaagcaatggatgatgacgaaacaaaatgaccaattatttacttctctacatgagtccctagggctgggggagggaggtggaagtgacccattatacacaaaagttctcaacatacatgatccaaatactatggcttccaaatagataaagcaaaaaacgaccatctctacacatgacagccataaacttacaaatgacaagggaaagtttgttaaatccacaattgatatgggaaaacaacatatttctaagaaaagactgcttgggaaaattagtaaggacctgaaccactcaatctacacccttggttgaatgcccccaacaattaaataatccacatatttacatccctagcatacatacatacatggtgcatttgcaaaaacttgtctctgacattcactgtggtcctgcatgctggccattgttgggcgctggaacacacaggtgacactgagctccccaggaatggctcatgggaaaggggtcagacatccaaacaaacagtcagaaccaacatgaatatattagaaaatgataatcacaacagcagtcaatactcgagcactctacaaatatgaacttgtttgattcttctatctcctatttttaatttcgtgttgaagataaggaaactgaggcagagaatggctaagtaattgccctcatttatagctttgtagcagaactctgtttttgtgagtgtgtgttttgttttttgttgttttctgagatggtctcactgtcacccaggctggagtgcaatctcgcctcaacgcagcctcaatctcctgggctcaagtgatcctcccatctcagctgccttcttttttgtttttttttttaagacggagtcttgctctgttgcccaggctggagtgtaacggtgcgatctcggctcactgcaatcactgcaacctctgcctcccggttcaagcgatttgcttgcctaagcctcccaagtagctgggactacaggtgtgcgccaccatgtccagataattttttcatttttagtagagatggagtttcaccatgttggccagactggtctcgaactcctgacctcaggtgatccaccccaccttggcctcccaaagtgttgagattacaggcgtgagccactgcacctggcctaatatttgtatttttagtagagacagggtttcaccatgttgatcaggctggtcttgaactccttacctcaagtgatccacccgcctcagcctcccaaagtgctaggattacaggtgtgagccactgtgcccagcctatcccagccttttgaggagctgaaaccacaggtgtataccagcacgcccagctaatttttacatttttttgtactgatgaggtctcactatgttgcctaggccagtcttgaactcttgaactcaagcaatcctccaccttggcctccccaagtgctgggactacaggcaggagcaaccacaccaagtcagaacttagaatcaaagatcagctgactccagagctcaaggtctaaactacaatataaacatcatcctggctgggcgcagtggctcacacctgtaatgtggtggcaggctcctgtaatcccagctactcaggagcttgagacaggagaatcggagaattgcttgaacccaggaggcgtggctgcaatgagccgagattgcaccactgcactccagcctgggtgacagagcaagactctcagccaaaaaaaaaaaaaaaaagaagtgaagcggggaaaaaaacaacagaataaaccaaacaaataaggaaaaataggccacgtgtggtggctcgcgcctgtaatcccagcactttgggaagccgaggcagacagatcgcttaagccaatgaatttgagaccagcctgggcaacatggcaaaaccccgtctctactaaaaatacaaaaattagccagcatgtgcctgcagtcacagctactcgggaggctgaagtgggaggatcgcttgagcccggaagtggagggtgcagtgagctgagattttgccactgcactccagcctgggtgccaaagcgagaccctggctcaaaaacaccaaaacagaaagaaagaatggaaaaataatgataaatggtaaagcgtagatgtctgaccccaccccacttccccatccccacccctagtcagatgaccccgctccccatcacagggccagggtcacacccagcacaaggcacttgcccagttacatgggaattggtggcaggacaccagggtttcgttcctggtcctgttcctttttttttttttttttttgacagggtcttgttctgtcacccaggctggagtgcagtggcacgatctcggctcactcgaacctctgcctcgtgggttcaagcaattctcctgcctcagcctcccaagtagctgggactacaggcgcccgccaccacacccggctaattatttatatttttagtagagtttcaccatgttagccaggatggtctcggtctcctgacctcgtgatccacccaaagtgctgggattataggcgtgagccaccacgcccggcaccaccccaccctttttttttctttttttgagatggagtcgtgctgttgcccaagctggagtgcagtaacacgatctcgtctcactgtaacctccacctcccctgcctcagcctcctgagtagctgggattataggcacctgccaccatgcccggctaattttcgtatttttagtagagacagggtttcaccatgttggccaggctggtcttgaactcctgatctcagatgatccacccacttcccgtagtgctgggattacaggcatgatgcaccgcgcccggtccctgttccttctatgccctaccctgctgctcctttgtccagaatcctgactcatccatacctcacccatggcttgttggccttagagtccactgggtcccctcccttttaagttttcctttctgactaatggtccctgaaggcaggaatcatccaagccctgagatcctggaagcagacaggaaccagacagggcctgctggatcccagctttcccacctctggcagtatgacctcaggcaggtttttcagccccatgtgcctcagtttcccccactgtaaaatggcaataatgacagcatccacccatgggctggctgaccatccgctgaaacaaacccagcagagcacctggtaccagtttggcactgaggcgtagctcacacctgtaatcccagcactttgggaggcccaggcaggcggatcacaaggtcaggagatcgagaccatcctggctaacacggtgaaaccccgtttctactaaaaatacaaaaaattagctgggtgtggtggcgggcgcctgtagtcccagctactcaggaggctgaggcaggagaatggcgtgaacccgggaggcggagcttgcagtgagccgagattgcgccactgcactccagcctgggcgacagagccagactccgtctcaaaaaaaaaaaaaagtgggctgggtgtgatgactcatgcttgtaatcccagcaccttgggaggctgaagcgggcacttgaggtcaggatgagaccagcctggccaacatagtgacaccttgtctctactaaaaatacaaaaaattagttgggcatagtgacaggcgcctataatccctgctactcgggaggcaaaggcaggagaatcgcttgaacctgggaggtggaggttgcagtgagctgagattgtgccactgcactctagactgggctacagagggagactccatctcaaaaaaataaataattaaacataaaaattgaaagtgaaggctgtgggtggtgactcatgccttaatcccagcactttggggggccagggcagaaggatcgcttgagccttggagatcaagaccagcctgggaaacaaagtgagaccacatctctaaaataattttttaaattggctgagcatggtggcatgagcctgtagttccagctactcggggaggctgagacaggagaatccgctgggcccaggagtgtgaggctgcagtgagctatgatcatgccactgcactccagcctgggcaacagaggtgggccctgtctctaagtaaataaatgaatgaaacacttgtggattacttagggaatgaacgctaattttccagaggaggaaactgacgtccaacgggatcaaattacttaccctaggtcacacagctgatgagaggtgaagccaggactcaaagctgggcactctggctttttcattttatttttgttttgttttgctttttgtttgagatgatctcacgctgtcacccaggctggagtgcagtggttctgtcacagctcaatgtagcttcaacctccttggccgccaagcccaactaattcttctttttttttcttagacgcagtctcactctgtcacccaggctagagtgcagtggcatgatctcagctcactgcaacctctgcctcccaggttcaagcaattcttctgcttcagcctcccgagtagctgggactacaggcgtgcgccaccacgcccagctaatttttgtatttttagtagagacagggtttcaccatgttggccaggctggtcttgaactcctgatctcaggagttcaagaaaaaaaaaagaaaacttgtgcttttaggagtaagacagctttaccatagcagttagaaatacatcattaaacgtggtaaaaaatacaatttttttcttcgtttcctagtacatgtcacaggttttgaaataaagatggtaaaaataccattttgtatgagtaagcttcagacaagcacaggctgaaaacaaatttaagatttcaagaaaaggcaaaataacttggaaagcagacaaatgctctaagacaaataaatgaaggcaacggaaaacaaaaaagtgtcagatcaccccagggtggccagatgtgacacataggatcagggacaagtgagagactggcaacttttccccaaaccaataggttttcagataattcaatgagggctggagacagaatgttaaaaaatccatgaaagcagtgacaagcaggccaagctggcataaggggctgaaaatgaattgggaatagagaaacccaaacttgaaaatgagcacaaatgctcgcatacttgcagaactgccctaccattatgacaacagcaagttccccaatggcagggtcgagtctgcacccaatacaggcgctggcacatggtaagtgctctattaacacttgtgggctgggctctgtggctcatgcctgtaacccagcactttgggaggccgaagtgggaggatcacttgagtccaggagtttgagagcagcctgggcaatatagcaagaccctgtctctacaaaaaaaaaatttcttattttttctgttcgagacggaggcctgctcgttacccaggctggagtgcagtggtgcaatctcagctcactgcaacctccgcctcctggggttcaagtgattcttgtgcctcagcctcccgagtagctgggactacaagcacacgccaccacgcctggctaatttgtatttttagtagagatggggtttcaccgtgttggccaggctggtcacaagctcctgacctcaagagatctgcccatgtaggcctcccaaagtgctgggattacaggcatgaggccactgtgccccatcaacaacaaaattttttttttaattagctgggcatggtggcaagcacctgcagtcccagatactctggaggctgaagcaggaggatcacttgaggccaggagcttgaggctgcagtaagctgtgactgcaccactgtactccagcctgggcaacagagacaggccctgtctctaaataaataaataggctgcggtggctcaaccctgtaattctagcactttggaaggctgaagtgggtagatcacttgagctcaggagatcgagaccagccttggcagcatgtattattcatctctacaaaaattacaaaaattagccaggtgtggtggcatgcccctgtagtcccagctattttggaggctgaggtgagaggatggcgtaagatcaggaggtggaagtcacagtgagccaagatagtgccactgcattccagcccgggcaacagagccagaccctgtctcaaaaaataaatgaacaaataaataaataactaaaacacttgtgggccaggtgcggtggctcacacctgtaatcccagcagtttgggcaggtcgacagcttgagtctcattgttcaggactagcctaggcaacatggcaaaaccctgtctctacaaaaatttttttaaaaattagccgggcatggtggtgtgcgcctgcagtcccagctacttggaaggctgaggtgggaggatggcttgagcccgggaggtagaggttgcagggagccgagactgtaccactgcactccaacctgggcaatagagccagactttgtctcaaaaacttaaataaaaatgaataaataaacacatggactacttaaggaatgaaccccattttccagattcaaagttgggcactctgactccagagtgcatttttctccctgttttctttttgttttgttgttgctttgatttttttgtttgtttgtttgagatggtctcgctctatcacccaggctatagtgcaatggggcaatcagagctcactgcaccttccacctcctgggcccaagtgatcctcccgcctcaacctccagaggtgctgggactataggctcatgccaccaagcctgactaattttttaaaaaatttatttgaggctgggtgcagtggctcatgcctgtaatttcaacactttggaaggccaagacgggcggatcatttgagcataggagttcaagaccagcctgggcaacatagtgagaacccgtctctacaaaaaagatacaaaaattagctgtgtgtagtggcatgcaactgtagtcccagctatactcaggaggctgaggtgagaggatcacttgagcccgggaagttgaggctgcagtgagctgagatcgcaccaccgcactccagcctaggagacagagcaagactccatctaacaacaacaacaaaaaaaatggctgggcacggtggctcacacctgtaattctagcactttggaaggttgaggcgggtggatcacttgaggccaggagtttggcaccatcctggccaacacaacgaaatctcgtctctactaaaaatataaaaattagcagggcatagaggtgtacacctgtaatcccagctacttgggaggctgaggcaggagaattgcttgaacccaagaggcggacgttgcagtgagccaagatcatgccactgcactccagcctgggcaacaaaacgagactgtctaaaaaaaaaaaaattgtttgtagagatgaattttccctgtgttgcccaagctgatttcaaactcctgagttccactgatcctgccaccctgttaatcccagcctcccaccttggcctcccaaagtgccaagattataagcatgagccaccttgcccagcctcagtaccttttcttgaaagaataaaaatcatagaaagacctcacacttattgagagcataatacaccccaggcattttatatatgccacctcatcagttaccacgtcaactccttacgagaagctcagagtttaaatgtggtcccatttttacatgagaatactgaggctggctgggcactggggctcatgcctgtaaccccagcactttgggaggcctaggcgggtggatcacttgaggtcaggagttcaagatcagcctgggcaacgtggtgaaacgctgactctacaaaaattaggcaggtgtggtgacacacgcttgtagtcccagctactcaggaggctgaggtgggaggatcccttgatcctgggaggtggaagttgcagtgagccaagatgatgcccctgcatgccagccagggcaacaaagtgagaccctggttcaaaacaaaaaaaaagaaaaaaaaaaagaggtcggagcagtggctcacgcctgtaatcccaacacttagggaagtcaaggagggtgcatcacctgaggtcaggagttcgagaccagcctggccaagatggtgaaacctcatctctactaaaaatacaaaaattagctgggcgtggtgacacaagcctgtaatctcagctacgcaggaggctgaggcagaagacatcatttgaacccgggaggcggagattgcagtgagccaagatcacaccactggcctccagcctggacaacagtgagactctgtctcaaaaaaaaaaaaaaagggaaaagaaaactgaggcccagagtgggaatgcagcttggccaaggtcacacagcaacagaagcagggttttgaccctgcgcctctctgaagccagtgttttcaaccataagcttactatcacagccaatgaattaagcccagaaagctcacaataaaccaaactgtttcaaggtgaatttacaaagttgtcaaactgcccaatgaggccttaatgacccaaaagttaaacgaacaaaagcaaactaacaacaacaacaacaagaaaaacctagttagaaatattttctcttcactgaaacacctggagtaaggccagactgggtatttggcggggacaggaatgggaatggggacacactgagtttccttgttctttttttttgagacagtctcactctgtcgcccaggctggagtgcagtggcacaatcttggctcactgcaacctccacctcctgggttcaagagattctcctgcctcaggctcctgagtagctgggactacaggcgcccgccaccacgcccagctaatagagatggggttttgccatgttggccaggctggtcttgatcaaactcttggcctcgggcaatctgcccgcaatggcctcccaaagtgttgggattacaggcatgagccaccatgcccagcccacagattgagtttgtaagcacactctccagaagtcgtaattggatttaggagcccagaggtggagggcagggacatggtgacaacatgagagagaaaggagacagcctgacatcttccctcttggttcctctctactgccttctctttcccactgacattcaaaaacaacaactcacacgtactgagcccttccataagtattggagtaagggctcataaagtaagttccactatactgcattatcttcccgaaacttctcaccttcctagggttactgatcccattttataggtgagaagaacccaaaagaagaacccttgcccagggccaggcgtggtggctcacgcctgcaatcccaacacttttggaggttgaagcaggaagaccccttaagcctaggaatttgagaccagcctgggcaacaaagtaagacccgcgtctctacaaaaataaaaataaaaaattagccgtgtgtaataaaaaattagtcccagctacttgggaggctgaggtgggaggatcgcctgagcccaggaggttgaggctgcagtgagtcatgattgcgccactgcattccagcctgtctgggcaacagagcgagaccctgtctttaaaaaaataaaaaggctgcgcgcagtggctcacgcctgtcatcccagcactttgggacgctggggcgggcagatcacctgaggtcgggagttcaagacctgtctctactaaaaatacaaaattaaccagacgtggtggcgcatgcctgcaatctcagctactcgggaggctgaggcggagaattgcttgaacccgggaggcggaggttgcggtgagccaagattgcactccgcctgggcaacaagagcgaaactccgcctcaaaaacaaaacaaaactaaacaaaaaaccataaaaataaatatagggccaggcgcaatggctcacgcctgttaatcccagcactttgggaggccgaggcgggtggatcacctgaggccaggagttcaagaccagcctgaccaacatgcagaaaccctgtctctactaaaactacaaaaattagccagggcgtggtggcacatgcttgtaatcccaactactcaggaggctgaggcaggagaatcgcttgaacccgggaggcagaggctacagttagccataccactgcactccagcctgggtgacagagggagactgtctctaaataaataaataaaaataaataaaagacttgcctaaggtcatatagcaagtaaatggcagaactaatattctagactgctttgttcgctgtctctactcatcacattgtatatttcagtatggagagaggactaaattatagtgctgaaagcacagattctgagccaggctgccaagatcggaatcctgagtctagcaattaatgctggatagccttgggaaagttgcttaatttctctgtacttctgcttcctttctgtaaaatggagaaaataacagcacctacccctcaggggtgttatcagaattaaatgagttaatgtgtacaaacagctaaggacagggccaggcattttgtaaaacaataagcgttagctgtaatccacagtggggagcccctacatgcttctgagctggggtgtgtgcccagatcagtgccagcttttgagaaaacgcctctgggactggactggaaaggaggaaatccattagcacctgtaacccagtcacattccgggggcggagaacttcccaccaacagctctgagactgaaacttcacagcccagctctcccactaatagtaacgattttaatgactccctttaaccctgttctcagaggcatgcttgctgttcccatactacagataagggcactgaggctcacagatttgtccatggcacaaaggggtggaagaataggggatatgaatgctgtacttctcatagggataaaccattacactcttctaaattccaccggggaagtgagggtgcgaaagcctgtctcgatggccctttctggccgtattatcctacagttctgtgcctgtccagcttaccgggagtctctggcgggactagggaaattatcactacatccaggcccctaatttcacgctccttaccccaccctcagtcctggagcctaaacccacactctatcctaccactgatttctccctcctacctcctcaacttgccttcctgcccccaatccgatccagaggccccaacccattgcgtccaccgttcgcctgtcccttggagcttccagaccccctcactcatcctaaccctgatcctcataccctcgccgcaggttaagcccccatcgaaatcgaccccttcagggcctctacctggatgtccagcccagtctccaactcggggcccacttccccagctctgagcccctttacaatcaattccaaagctccactcccaccccacctccaagacccctccccaagccaccattcttctactactacctccggctcccattcctcccagtcctctcccccaggcaatctcccctcacccagccccttctttcgcccctgcctcttccccctcgtcacccggtcccgaacccccgtcccgactctccagcgcccccggcccgcgcctgggctctcaccatcgccgcgcgctgcatctccctcggctacgcgggtttcccccactcgctcctctccagcctccccttccgggttctcgtcccgaagcccgctgggaattgaagtccgggcagccacggactacatcccccagaaggcagcacggtcaagcttggaggtggggtaggaagcaaattaggcgggcggaggaaaagaacgactcgaactcccgggagacaaagccggggaggacttggcagcgcaagcgcagggtgcttccccgctgggcgcgctgggagatggagtctagccaggagggctccatttttgcccgaggcccttgggaagggaattgagaatattgcaatagggtgttggtgaggggtggagagttggggaagagcaaatttattgattcatttgtgccgatcaacacaatagctaacagctccttgtgcttttccaaactccttcccatccatccccttctttttttttttttttttgagacggagtcttgctctgtcacccaggctggagtgcagtggcgcaatttcggctcactgcaacctccgcctcctgggttcaagcgattctcctgcctgagcctcctgagtagctgggattacaggagcccgccaccacgcccggctagtttttgtatttttagtaaaaacggagtttcaccatgttggtcaggctggtcttgaactcctgacctcatgatccacccgcctcggcctcccaaagtgctgggattacaggcgtgagccaccgcgcccggcccgtcccctcctttcttacctcctgatttacaaatgagaaaattaagccttaggaggaaggaaagtcccatacattaggagttagtccacatcatagaatagcagctccacatcgctcgagcccaggagttcgaggcagtgagctagtgttacaccaccgccctccatgcagttcagcctgggcgacagaatgagaccctgctgcctcttaaaataaaagaaggccgggcgcggtggctcacgcctgtagtcacagcactttgggaggccgaggcgggctgatcacaaggtcaggagatcaagaccatcctggctaacacactgaaaccccatctctactaaaaatacaaaaaattagccgggctgggtggcgggtgcctgtagtcccagctactcgggaggctaaggcaagagaatggcgtgaacccaggaggcggagcttgcagtgagccgagatcgcgccactgcactccagcctgggggacagagcgagattccgtctcaaaaaaaaaaaaaagaagaagaagaagaagaagctccaggagggcagagatctttgtgtaccttgttcaagcacctagaacagcgtaaacatgtgttcagtaaatatttattgcatcggaactatatgccagacaccctacagacaaccctggtaggaattacaatcccaaatttataaggcagaaagagattaagcctcttgtcgctggcaacacagccaagaaaacgatttgaactgaaatgtattggatttcagggtttctactcttgactaggtcgttagatcatctccccttaagacgtattttccaggctgggtgcggtggctcatgcttataatctcagccgggagactggctttagtccaggagtttaagaccaaactaggcagcaaagtgagaccctcgtctctaccaaaaaaaaaaaaaaaaaaagcccaaatcttttattctttttctttcttttttttcctttttttttttttttttttttttgagacagagtcttgctctgtcgcccaggctggagtgcagtggcgataccagctcattcaacctccacctcccaggttcaaatgattctcctgcctcagcctctggagtagttgggactacaggcgcgccccaccatgcccggctaatttttgtatttttagccgagacggggtttcaccattgttggccaggctggtctggaactcctgacctcaagtgatccgcccgcctcgtcctcccaagaaggcccaattcaaatggccctcctctttgaatcctttcccaacgtattgttctctgcattaaccgagttcccgtctcaccggattctcatggtctcggaggttctcacggtcttctcgattgtactgggaagacagtggctaagttcccaccatctagcctggtgcttggcacacaggaggccctcatgaatcacgaactgaagggaaaaggtggaaatgggacatcatagggccagaagggacacaggcgagctcgctctctctctcttcctgagagttggcagttgaggaaacccagcctacttgggatgcaacggccctggaccacgcgggtcgtgcaggggcgtgaccgcttaaaaaggcgggtggctgagcgggcgctgattggtcacctagcggctcacgccgaccaaggccttgtcagaaggctcgaggccgagctcacgctgtgcaagacgacagggcccttcccgaggcgcgcgtgcgcacggccacttgcaccctgccctttcaaccccgtcgtctcgtgcccagcacatcttggctggaactggtaggggcgtggcctggcctcaggaacgcactcttgctctgctcctcacgcctcgcgcaggatcctcgcgccgggaggattcgcacccaaccccaagcccggttgggaacgtggtgtccgagaccgtctgggatccccgcgcgcacggccggcttcccgggacccgcgcgagacgctgtctgatcgggctccctagagtggggcccggagaaaccagaacggcgggggcagcctcacgccattttgcacgccctgaggcgggtgctggaggccaaggggaatggggcgcggggcagggggcctcccccagcactagctgggcttaggggaacccgggatccccacaggagcttccctcggtggggggctcaggggaatagaacatgctctgggtgcagggccacgggcgacggagtttgggtttgaagccgggggtccaggttcgagtttgaggaacggaagactctgtttgtgttgggaatccgggctctcgagttctgatctgggatctcgggatttgtgtctaggggtgactagttctggaatctgaagagcttgagttttgtgactggaagctttctccttggaatccagagatcccaatttggggatctggaagtcttagttctgagttatgatgtaacattttgagagtctggagcctgatttggggcaactgaagcctcagtatagatttagggcctaaatcccaatgtagagtatgaagctttaggatctggagtcgcagtttgagtctttagaagcacgttttagggcctggagtgcccacattgagtatgggagctccagttttagggtctggggtttcagagtaggacccacattcgagatctcagttttagggttggggccacaatttgagggacagtttggacgtctaagaggtcaatctggagaagtgagatttgtttcataggggcctggatttcttatcttaggatataggttcatagtgttacagcttgcagtctgtaatcttagtattaggatcatatttgaagatcagaagttgacagtttgagggtctggggtatctcagtattagaatttagggtttgtaggtttgggagggctcctttttttttgtttttgagacaaggtctcactttgtcatccaggctggagtgcagtagtgcgattttagctcactgcagccttgacctcctgggctcaaaccatccccccacctcaggctcccaagtagctgggactacaagcatgtgccactatgcccaggtaattttttttttttttttgtagaggtggagttttgtcatattgccaggctggtctcaaactcctgagatcaagcaatcctcctgccttggcctcccaaagtgctaggattacaggcgtgagccactgtacctggctttgggagggctccaaagtgaggatttaggtcctcattttgggactctaaagtattagttttagtgcctttttagaggtttaggggtttgtttttgtttttgttttttgagacacagtctcactctgttgtccaggctggagtgcagtggcttaatcctggctcagtgcaacctccgcctcccaggttcaagtgattctcctgcctcagcctcccaagtagctgggattacagtcgtgcaccaccacgcccggctaatttttgtatttttagtagagatggggtttcaccatgttggccaggctggtctcaaactcctgacctcgagtgatttgcctgcctcggcctcccagaatgctgggattacaggtgtgagctaccacttctggccaaggtttagctgtttaatttgggtctttgggcccataatttgttggggctagggactcttattttgggatctctgggtgctcaaaggagcatcatagggaagatgaagggtgcccatcagggttcctgcccatccttcctgcaatcccagaggtcactaatcattctttttccctctttgcagatgtttggttccagcagatacttgggttcctctgaacagcccagagctaattcactgggtcccagtgacaggtaagggcttgccccatctcccttatagccccagccactctcattgaataataataacaaaaacatttgctgagcatttaccgtttgctagactctttgccaaacattttgtttgtatgataactgttaatccatacaacaatctcatgaggaagttgtgtacaaagatgcctaccattttccagatgagagtactctgaggtgatcggcaaagatcattgcttatttatttatttatttatttttgagacagggtttcactcctgttgcccaggctggagtgcagtgttgcgatcccagctcactgcaacctccgcctcctgaactcaagtgattctcctgcctcagcctccccagtagctgggactacaggctcatgcctccatgcctggctaatttttgtattttttgtaaagatagggttttgccattttccccaggctagtcttcaactcctggcttcaagtgatctgcctgtctcagcctcccaaagtgctgggattacaggtgtaagccaccatgcccagcccatttctttttttatttttagggcaaagataacttctaaggtccttgcagcctgtgacattctgagtttgtttgttttcagagttagggtatcactctgttgcccacgttagagtgcagtggtggcatcatagctcactatagcctcggactcctgggtttgagcctgggcttgatcctcctgcttcagccttccgaacagctaagattacaggcacatgccaccacacccagccagtttttctatttgttgtagtgacagggtcttgctatgttgcacaggcctgtcttgaacttctggcctcaagtgatcctcctgtcttatcttcccaaagtgctggaattactaagccaccacgcccaactgacattctgagtgtctttctttctttcctttttttttaagacagagtctaactctgatgcccaggctgtagagtgcagtggcgcgatcttggttcactgcaacctctgcctcccaggctcaagcgattctcctgcctcagcctcccaagtagctgggattacaggtgcccaccactatgctcagctaatttttttgtgtgtatttttagtagagacagggtctcactgtgttggccaggctggtcttggactcctgacctcgcgatccgcccgctggagtgcagtggcgtcatctgggctcactgcaagctcaacctcccggattcacgctattctcctgcctcagcctcctgagtagctgggactacaggcgcccaccaccatgcctggctaattttttatattttttttagtagagatggggtttcaccatgttagccaggatggtctcgatctcctgacctcgtgatccgcccacctcagcctcccaaagtgctgggattacaggcgtgagccactgcgcccagcctttttttttttttttgagatggagtttcactcttgctgcccaggctggactgcaatggcatgaactcggctctctgcaacctccgcctcccgggttcaagcgattctcctgcctcagcctcccgagtagctgagactacaggcgcatgccaccacgcccagcaaatttttgtatttttagtagacatagggtttcaccatgttgttcaggctggtctcgaactcctgatctcaggtgattcacccgcctcggcctcccaaagtgctaggattacaggtgtgagtcagcaagcctggcttctttcctttttttttttttttgaaacaaggtcttgctctgtcacctaggctggaatgtggaatgcagtggtgcaatcccagctgactgcagcctcgaccttctgggctcaaacaatcttcccatctcagccccctgagtagctgggaccataggcgtgcaccaccacgcctggctaatttttgtatttttcgtagaaatgggtttttgccatgttgccgaggctggtctcaaactcctgggatccagtgatccacccagcctcccaaagtgctggggttacaggcatgagccaccacgcctggctctttctttttagacagggtcttgctctgttccccaggctggagtgcagtgacacgatcacagtttactgcagctttgacctcccagactgaagcagtcctcccacatcagcctcccaagtatgcaggaccacaggcacacgccactatgcccaactaattaaaaaaaaaaaaaattggccaggtgtggtggctcacacctataatctcagcactttgggaggccaaggtgggttgatcacttgaggtcaggagtttgagtccagcctggccaacatggtgaaactccatctctactaaaaatacaaaaattagctgggcatgatataatcccagctacttgggaggctgagacaggagaatcgcttgaacccaggaggcagaggttgcagtgagccgagatcgcgccattgcactccagcctgggcaacgagtgaaactctgtctcaaaaaaaaaaaaaaaattgtggacagggtctcaccatgctgcctacactggtctgaaactcctaggctcaagtgatcttcctgcctcagcctccaaaagtgctgggattacaggcgtgagccaccatgtctttacttcctttcttttattcacgcattcattcatccatcaagcacttaccaagtgtaatgaatcttatagagggaattttcacagcagattggaggttggatcagatttctccctccctccaaagtctggataaagaaaaaataaggccaaagttcatattaacccctaccatctcccccagtgactttccatccaactatctcttcattaactccaaaattaagcatctacggggttatgtcctgataaacccatcataaactgaaaatattgtatgtcaaaaatgcatggttgatggctcaggcctgtaatcccaacacttggcgaagccaaggtgggctgatcacttgaagtcaggagtttgagaccagcctggccaacagggcaaaaccccatctctactaaagatacaaaatttagccaggcatggtggtgtgtgccggtaatcccaagctactcaggtggctgaagcaggagaatcacttgaacctgggaggcggaggttgcagtgagccaagatcgcgccgctgcgctccagcaacagagcaagactcagtctaaaaaaagaaaaaaaagcatagctgattgggagctgtggcccagtgttgctgcccagcacagtaagagaagtatggcttctactgaatttgtatggctttcacaccattgtaaagtcgaaaaatgttaagtccgactgttgtaagacgaggactgtgtgctttgtttaggttctctacctagatactatgctcagaagaagcaccatgaagaaaatgaagaatgcctatcctgctgcccattcctcctggaattttagagttgccacaattcatactttcatccccctttctagatgtgggggtccttgtattgataaagactgttagttgcgaagaacagaaacctagcaaaaactggcttaagcataaaaagggatttattggatcatttaaacaaaaaattcagggatgtcggccttggctggttccaggatggaggttaaatgatgttgccgggaatctgcgtctcttggctctggtattgtctgtgttggcttctgtctcaagcaggttctccctttgctttatttatatattttatcttattgtttgtttgtttgagatggagtcttgctctgtcacccagactggagtgcagtggcatgatagctcagcgcaacctccgcctcctgggttcaagggattctcctgcctcagcctcccgagtagctgagattacagacatgtgctaccaggcctggctaattttctcatagttttagtgaaaacggggtttcaccatgttggtcaggctggtctcgaactcctgacctcaaatgatctgcctgcctcaacctcccaaagtgctgggattacaggcgtgagtcattgtgctcagctgcaggttgtccctttggaagggcaagatggttcccagcagttccaggtctatatcttgccaactccatatacccagaagagaaaacatctttctaagattgattgactctgattggccaaacctaggattaccactccaaccctgaaccaatcactgtgactattcttggcaggaccttggttttgtgctccctagtggaaggggaagataaggtcaacccctccgaaccacatggactgagaatggaggagaaatggttgctcaaaggaaaactgaggtactgttaacagaaaaggggggattggatgttggccaagcaaaaacatagcccattgttcaacacctcttacccctaaaatcattctgacaaatgactgtacacacatgctttctttcttcctttttttttttgagacagagctttgctcttgttgcccaagctggagtgcagtggcgcaatctcggctcactgtaacctctgcctctagggtttaagtgattctcctgcctcaacctcccgagtagttgggattacaggcacgtgccaccacggccagctaattttttgtatttttagtagaaacagggtttcaccatgttagtcaggctggtcttgaactcctgacctcaggtgatctgcctgccttggcctcccaaggtgctgggatacaggcgtgagccactgcacccagccccacacgctttcttgaactaacatttcatgaacactccctatgtaccaggcactatacgaaacaccttccagataagatcaaggttttcctagccacctccattttgtaaaggaggaagaaacaggcacagagaagtgaaagcagttgcccaaagtcacacagcaagcggaggaactaggatttgaatcccagtctttctgcttcaaaaactggagcttatatatcaacctttatgccacctcctgggactgtcccctgctttgtcccactttggggcagctcttactcttacatccctacacactattaaaacaaatgaaggccgggcacggaggctcacgcctgtaatcccaaaactttgggaggccaaggcggatagatcacgaggtcaggagattgagaccatcctggccaacatggtgaaaccccgtctctactaaaaatacaaaaaattagccaggtgtggtggcacatgcctgtaatctcagctactcaggaggctgaggcaggagaatcgcttgaacccaggagacggaggttgcagtgagccgagatcgtgccactgtactccagcctgggcaacaaggcgagactccatctcaataataataataataataataataataataataataataataataacaatgataataaagtaactagggtatgttcaggttgattagctcagggaaaaggaaacttgagaattaggttcatatgccactttagaagtctgagcagctatcccaagacctttcagtattcattaattcaataattctttattgagcacccactaagtgttaggcattattccaggacttaagggatataaccagcgcagcattatggcttctgtgggccctatacaattttaccttcttgatccccttcttccatagaaaaatattaacgctgggtgcggtggctcacgcctgtaatcccagcactttaggaggccaaggcgggcagatcacgaggtcaggagttcgagaccagtctggccaacatggtgaaaccccgtctctactaaaaatacaaaaattgggaggcatggtggcgggcacctgcaatcccagctacttgggttgctgatgcagaagaatcgcttgaatctgggaggcggagatttcagtgagctgagatcgcaccactgtactccagcctggacaagagcgagactctgtctcgggggaaaaaaaaaagaaaaatattaacaattgtggtttatgatagtattgatatgaagacaagtatactacagatggggtgatatttattttttgttctaatttaaaaggaattagaatattttcatgagcccctaaaagtatcatgggttccaagcactgtgctttctgcattttatggataaatcagcctgggatatagcaataaataagacaaaaattcttgccctgtggcgtgtgcctgtaatcccagctacttgggaggctgaggtaggagaatcactctagcccaggaggtggaggttgcggtgagccaagagcctgccactgcactccagcctgggcaacagagcaaaactctgcctcagaaaccaaccaaccaaccaaccaattcttgccctcatggagttcatatttataattaataaattaatgaaagaaataagatttcacagcctgtacaatatagagagaccgcgtctccaaaaaaaaatttattttaaagtttattttattttatttattatttatttatttattttttgagacggagcttttgctcttgttgcccaggctggagtgcaatggcacgatctcggttgctcactgcaacctccacctcctgggttcaagtgattctcctgcctcagcctcccaagtagctgagattacaggcacctgccaccacacctggctaatttttgtatttttagtagagacaagatttcaccatgttgatcaggctggtcttgaactcctgacctcaggtgatccacctgccttggcctcccaaagtgctgggattacaggcgtgagccaccacgcccagcttaaaagttttttgtagatgcagggtctcactatgttgcccaggctggactcaaactcctgggctcaagggaccatcctgccttggcctctgaagtgctgggattacaggtgtgagccactgcacccagccttgtctctacaaaaaaattttaaaaatagcctggcatggtggtgcatgcctaaagtcccagctactcgggagactgaagcagaaggattgctggagcccaggagtttgaggttacagtgagctatgattgtgctattacatatgagcttgggtgacagagcaactcgttgtctctttaaaaacaaacaagcaggccaggcgcggtggctcacgcctgtaatcctagcactttgggaggccaaggcggacagatcatgaggtcaggagattgagaccatcctggctaacacgatgaaaccccgtctccactaaaaatacaaaaaattagccaggcgtggtgtcaggcacctgtagtcccagctacttgggagactgaggcaggagaacgtgagggtgaggctgaggaggcgtaatcccgggaggcggagtttgcagaagctgagatcgcgccactgcactccagcctgggtgacagagcaagactctgtctcaaaacaaacaaacaaaacaaaacaacaacaacaacaaccagggcaacagaacattccaaacagagaaggcagaaataaaattggcagttgagagaaacagaaagaaaacctatgtgactggagctgacctgttccctgaaaacccagagggcacagctgggattagtggatgcaaatatacagactgtgagggaagaaattggctaaaacccgaaccatccagcaaagaaaagaggcagctctgggaggtggtacatggcttctggagggccctgagagcggagcccaggttgtacttcttcaggactactgcccagacactggggatgccaagacattgggattcccatccactcagttgctccctttctaacctctgtgtttacccagaaggttcaccctgtgctttgtaaaacccagaataaacacccagggactatggtttatatgaaaccctctgagacggtcaaataacaccttgaactttataagtagacctggacactttttcttccttgcttcctgagttgtttcttgtcgggtctgccaagggcccctctagaacacatgggaaataatgtgatatatatatatttatttatttatcagggctagacaggagtttaagctcagcctactcaatttatctcgaaggatagaaccccaacacccccttggctcaaagttatcgtttctaccaggaggtaacttggggactcatcagtgattttttttctttttttgagacagagttttgttctgttgcccaggttggagtgcagtggtgcgatcttggctcactgcaacctgtgcctcctaggctcaagcaattctcctgcctcagcctcccgagtagctgggattacaggcacgtgccaccacacctggctgatttttgtatttttagtaggaacagggtttcgccatgttggccaggctggccttgaactcctgggcccaagtcatctgcccacttcagcttcccaaagtgctgggattacaggtgtgagccaccatgcccagccaactttttattttttcataaaggcgaggtctcacttttttgctcaggctggtcttgaactcctgggctcaagtgatcctcccaccctgacctcccaaagtgctgggattacagatgtgagccaccacactcagtcaaaagcaaagcatggcctcttcatgtattggtgacaccacacttgccacttagcatttagatcaatttccttttacaagcttcttatttttactttttttttttttttgagacagtctggctctgtcacccacaatctcagctcactgcagcttccgcctctcaggttcaagcaattctcgtgcctcagcctcctgagtagctgggattataggcatcatgtccagctaatttttgtatttttagtagagatgggtttttgccatgttggccaggctggtcttgaactcctgacctcaagtgatcagcccacctcagcctcccaaagtgctgggatgacaggtgtgagccaccatgcccggcctccttttacaagtttccataacaccaagcaacacttttttctttatcacggctagcttcatagacatatgacctgggcagtcacatagggccctgtgcttaggatggtccaatgcttggtttgatgctctgctctcagcatcttttttttgttttgttttgttttgtttttgagacggagtttgttttgttttgttttgttttgtttttctcctgcctcagcctccccagtagctgggattacaggcgcctaccaccacgcctggctaatttttgtatttttattatttatttatttatttattttgagacggagtcttactttgtctcccaggctggagtgcagtgatgcaatcttggctcactgcaacttccacctcccgggttcaagggattctcctgcctcagcctcccaaagtgctgggatgacaggcatcagccactgcacccaccccacattaggaccttaaacttgatccttaacaatgggatgtcatggagaggtttgaagcaagagagtgacgtggtcagatttgtgtttcagaaaggtcaccctgactctagcagacagtagggatggaagaggccaaatggcagggttgagtgaactatcaggatgttaacacatggactagggcagggctgtggggttgaagagaaggtcatggaagaggagtgggtaagatttggtgactgactgattaagggctaagggaaagtaacaagtacgggtgatgcctgggattctgtcctcggtgtccagggtggggtgcgggcagccctaaaatgagtaacacagacaggaggtttgcgggttggatgtggaattcgttttggatgtcctaaccaaaaccagctcctgtccccaaacaggaatcagaggaaccaaaacaagctcctgtccccaaacaagaagcagaggaaaaaccacactagcaagctgcaagagttggcactgctgctgcccatagccctgaagacggggaccaagaagctcacaaaggtacagggactagaggagaggggccagatttgggacgcaggtctttaaatagcagcaaatgggtcaccctctcctgggaaacctggacagatcctttcagtggcagcattcaaatgggaatggtgctactctgaacgggaatttccgggagtctgtgatcccataactaggtgcctggaggatccttttttgcaaaggagagaggagaaaccgggctggggaaatagagatagcacaaagatcattgttccaggaatcaaatagccatgggtttgagccctctagcttcacagctacagaactctgggcagtttctcaggctacccagactttctttttttctttgttcttttttgtttttgagagtcctgagtagctgggactacaggcacaggccaccacacccggctaatagtttttttgtatttttagtagagacagggtttcaccatattggtcaggccggtctcaaattcctgacctcaggcgatccatccgccttggcctccgaaagtgctgggattacaggcgttagccactgtggccagccaaatttattctcttatggttctggagttcagaagtccaatatcagtctcagtggctttttcacttgtttggttgttttggggtttttaggttttgttttgttttgttttgtttttgagacaggatctcactgtctcacccaggctacagtgtagtggctcgacctcagctcactgcagcctctgcttcccaggctcaagcaatcctcccacctcagcctcccgagtagctgagactacaggctcatgccacacctggctaattttttgtagttttggtagagacgaggttttaccatgttgcccaggctagtctcaaactcctgacctcaagtgatcctcccaccttggcctcccaaagttcggggattacaggcataagccactgcacccagccagtctcactggtttaaagtcaagttgtcagcagggttggttcctcttagaagctctagagagtttgtttcctttctttttgccaacttctgggggctgcctgcattccttgacccatcatggtccctcaaagccagcatggaagcatcttcaaatgtctttcctgtcctaccgcttctgttgtcacattgccttccctgcctttgacattcctacctctgtaagattatatgtgattacactgggcccacccagataaacaggaataatcaggccatctcaagatccttaacacagcgggctcagtagtttgggaggccgaggtgggtggatcacctgaggtcaggagtttgagaccagcctggccaacatggtgaaaccccgtctctactaaaaatacaaccaattagccaggagtggtggcgcgtgcctataatcccagctactcaggaggctgaggcgggagatttgcttgaacctgggaggcagaggttgcagtgatccgagatcgcgccattgcaccccagcctaggcaacagagcaagactctgtctcaaaagaaaaaaaaaaaaaaagatccttaactcaatcatatctgcaaagtcctttctttctgccatacaaggcaacatattcataggttctggggactaggacatggacatctttggaactttggggggatgcattatacagtccacgatggtgctaaaaatatttgaggaatgtgagtttttggcatgcataggtgctggaatagcccttggggagccagagatgactatgacacagtccctcccctcgaggaatggcagtcttgtcaggggactggcaacgtttcataaatgaccggatggccacatctcttggaattctccccaggcctcagcctacttatttaccatgtgtcctctgctgtcttcagaacccctcttctcccacctcttcatccttccctcagctgcatcatggggtcctgctccacagacaacccgcatcccggggccgtgggacatgctcagtccagtgctccgcgccatagcaggagctgtgagaattgcctctcctgtgttagagacttggggtgcagctttgattcagagtgtccttcctcaccactctggctggtgaattgccccctgccccgtctgatcatgtaggttctccctctgaccatgaacacccccagcgtatcactgcaattacttccttgtttccgacctccttcaggtggagttctgccagagccataaaggagacatctctgtccgccttgcccacagggcctagcaagagcagagagcagacagcagacagcagtaacaaccgttcccaacttactgagcgttccaggtgtcagaccttgagtgctaagtgtcttagatacatttttctcatttaactctcccacaaggcttgtgagagatgtatggctatgctcattctttggtctgaggaaactgaagtgcagagaatggtcacatcgcccacaggcacagagttgagatagaaagagagacagagagaaagagagagggagggattcagatgtggccaggcacagtggctcacacctgtaataccagcactttgggaggctgaagcaggcagattgcttgagattaggagttcgagaccagcctgggcaatgtgacgaaagtccatctctacaaaaaatacaaaaattagccagccatggtccccgctacccaggaggctgaagcaggaggatagcttgagcctgggaagtggaggttgcaatgagtcgagatcataccactgcactccagcctgagcaacagagtaagaccctgtcttttttttttttttgagacggagtcccgctctgtaccccaggctggagtgcagtggcaccatctcggctcactgcaagctctgcctcctgggttcacgccattctcctgcctcagcctcctgagtggctgggactacaggtgcccgccaccacgcccggccaattagtttttgtatttttagtaaagacagggtttcaccgtgttagccaggatgacctcgatctcctgacttcgtgatccacccgcctcgggctctgaaagtgctgggattacaggcgtgagccaccgcgcctggccatgagaccccatcttaaaagaaatagagtcagatgtatctcactccaaaggctcttgccttcaaccattctgtcactcaaggttcaatagatgtttgttgaatgactgaatgagctccctttgttgggacagttacaggacctgttgatcttaccttcagaaggtctttgagagtccagactctggtgtagcccccaagctaaccttcctgaagtttcaattactgaggcatctgtcttgaaatctgggatgatgcccaattgctttctacatacaacctttatactagtaataataagtaacatttatatattacttcatggtttataaggactttttcttagcgagtgccaaccatatgctccaagcctggtattagagataataagcttaaaaagactgaggctggctgggtgcagtggctcacacatgtaatcccagcactttgggaggccgaggtgggtggatcacttgaggtcggtagttcgagaccaacctggccaacatggtgaaaccttgtctctactaaaaatacaaaaattagccaagcgtggtggcacattcctgtagcccctgctactcaggaggttgaggtgggagaatcgcttgaacctgggagtcagaggctgcagtgagctgagatcgtaccactgcacttcagactgggcaacagaccgagactccctctcaaaaaaaaaaaaaagactgaggccaggtgtggtggctcatgcctgtaatcccagcactttgggaggccaaggcgggtggatcacttgagcccaggagtttgagaccagcctgaacaacatggcgaaacctcatctcgataaaaaatacaaaaaattagctgggcatggtggcatgcgcctgtagtcccagctacttgtggggctgagacaggaggattgctcgagcctaggaggtggaggttgaagtgagctgagatggtaccactaaactccagcctggccaacagagcaagagaccctgtctcaaaaaaaaaaaaaaaaaaaaggccgagcgcagtggctcacgcctgtaatcccagcattttgggaggctgaggtgggcggatcatgaagtcaggagattgagaccattctggctaacatggtgaaaccccgtctctactaaaaaatacaaaaaaattagcgaggcgtggtggagggcgcctgtagtcccagctactcgctgaggcaggagaatggcatgaacccgggaggcggagcttgcagtgagccaagattgcgccactgcactccatcctgggcgacagaacaagattctgtctcaaaaaaaaaaaaaaaaaaaagcgcaaaaaaaaaaaacaaaaaaagactattggccgggcgtggtggctcacacctggaatcccagaactttgggagaccaaggcgggcagatcacaaggtcaggagttcgtgaccagcctagccagcatggtgaaaccccgtctctactaaaaatacaaaacattagctgggcctggtggcacgcacctctagtcccagctactcaggaggctgaggcaggagaattgcttgaacctggcaggcagaagttgcagtgagctgagatcgtgccattgcactccagcctgggcaacatagcaagactctgtctcaaaaaaaaaaaaaaagaaaaagaaaaagaaagaaagacagggttgagcacaacagccagggctcaagacaacgtggggctgctggggaccagagacacagaggctccaggaaggaccccattccccacccaccccaacaattcttcagtcggcagagaccttcttgttctgctatctagccctcactgcagaccagtgagacaggggctacagctacaggctggagtgcagtggcatgatctcagctcactgcaacctttgcttcaggctgtgtctctggtccccagcagccccacattgtcttgagccctggctgttgtgctcaaccctgtctttctttctttctttttctttttctttttttttttttttttgagacagagtctcgctatgttgcccaggctggagtgcaacggcgtgatcttggctcactgcaacctccgcctcacgggttcaagcaattctcctgcctcagcctctcaagtagctggcattacaggcatgtgccaccacacccagctaattttttgtatttttagtagagacggggtttcaccatgctggccaggctggtctcgaactcctgacctcatgatccgcccacctcggcttctcaaagtgctgtgattacaggcgtgagcctggccaaccctgtctttcttttgaggcagaaggagattctggtgcatgtcctgcagtacattcagtacctccagagaaacatcgatgccgccaaggccttgttcaaatgccacatcaccactggggaaggtggacttgcgggtaagtagttcagccagtgtttcctggtgcctgtgatgttccaagtgttgttccagccatcagggatactgagtgacccttctgtcaaggcctggtataggggacaaagagagatatgcaagatgcctcagagaagaggggccttggagctgggccttcaggactgtaggagatgcagggaagcccagccaggcagaagaaacaggccgggcacagtggctgatgcctgtactcccggcactttgggaggccgaggcgggcggatcgcttgaggtcaggagttcgagaccagcctggccaacatggcaaaaccccgtctctactaaaaatacaaaaattagctggtgtggtggctggcgcctgtaatcccagctacttgggaggttgaggcaggagaatcacttgaacctgggaggcggaggttgctgtgagccgagatcacgccactgcaccctagcctgggcaacagagcaagactgtgtctcaaataataataataataataataataataataataataatatatacataaaataaaataaatctgatcatgaccttcccctggcataaaatccctcagtaattttcatcttcttcacttccctccatagccaggtgctggaaaccatttgggatctcatccctgccttcctagtccctgccaaacctccccagcctcatctcctaccattctgccagcgtattttatttatttatttgtgctttttgttttgttttgttttttgttttttgtgtgttttttgagacggagtatcactctgtcacccaggctggagtgcagtggcgtgatctctgctcactgcgacctctgcctcccgggcctctgccagtatattttacactacagtaacagcgacagcacccagcacatctagccttaggggactgctatgttccaggtgctgtggtatgtttctttctttctttttttttttttgaggcagagtttagctcttgttgcgcaggctggagtgcagtggcgtgatcttggctcaccgcaacctctgccttccaagttcaagtgattctcctgcctcagcctcccgagtaggtaggattacaggcactcaccaccacacccagctaatttttttgtatttttagtagagacggtgtttcaccatattggccaggctggtctcaaactcctgacctcaggtgatccacccaccttggcctcccaaagtgctgggattacagctgtgagcccctgctcctagccgtttttttttttttttttttttgagacaaggtctcactctgtcacccaggctggaatgcagtggcatgatcatggctcactgtaacctcaaaatcccaggactcaaaactccaggggtcaagcaatcctcctgccgcagacttctaagcagcttgtactacaggcacgtgccaccaatatccagataattttcttttttttgagatggagtttctctctgtcgcccagactagagtgcagtggcgtgatctcagctcactgcaagctctgcctcccaggttcaagccattctcctgcctcagcctcccaagtagctgggactacaggcgcccgccaccacacccagctaatttttatatttttagtagagacaggattttgccgtggtcgccaagctggtatcacctcaagtgatccacccatctcagcctcctaaagtgctgggatgacagatgtgagccatcgtgcctggctctggctaatatttttgtttgtttttttgtagagacagagtctcactgtgttgcccaagctggtcttaaacccctgggcttaagcaattctcccgccttggcctcccaaagtgctgggattataggagtgggccaccaagcctgacttgtttctatgtattaactcacatttaatcgtcaggacaaataccgaagggaaaagctaatgtggtcctgttttgcaggtgatggaactgaagcccagagaggttaaggtcacagagatgagcctgagtcagggcctggctcagagcccacacacatcatctccatgccacgcagacctccaatcacacccaatgacttgcctgtccccagacaccccgcgcgtgtcttctcatgcctgcaagctcttactcagatagtttcttcttctttttttttttttttttttctgaggcggagtctcgctcttttcgcccaggctggagtgaagtggcgaaatttcggatcactgcaagctccaccccctgggttcaagcgattctcctgcctcagcctcccaagtaactgggattacaggcacccgccaccacacccagctaatttttgtccctgacatgtagtgttgaggactggtcatgaagtgagagactggagtcagggagatgaggaaagacactgttcggagtgatctagacgggacaattaggcccaagctagcgctgtagatgagaatgtggatagaagtgagtaaacctagaagatgttaatgaggaagaatcgagaggccagagggaaaggccccagtgaccttgagggggtcggctaggagaccctcactgtgttgaggaaggcgggaggaggtactggtgtgggcggggagagggtgaagcatcctcaaggtgcccagtctggggaagtgttgattccattctcccactgagccaaggcccaaaacagccctgaagaaacctgagttcttgccctctactttcacagtcctgactgagcggccttggataagccctcagtttccacactgtaaagtcagcctgggggcccaccctgacccgggactgaggagcattgtctggaaggcaggaactgcagttggatgcagatggggtgggggatctgagctgtttccctctccatccctgcagggctgggtcagaaaccagcctggggcccagccaggcggaggagacactctaccccctccagctccccaagctctcagaagtcctgtctccagggggcgtgccagaagcctcggaagaagaagctgacccaggcatcaggtacaagctgtcactggaggcagaactagaagcccaggtcacccaggagcagggctccttctccagggatgtccttactctgggggccttctcagcaccctgtgccggggttcaactcccagctcctccttgtattagcactgaggcctcacacccggaaacttggggttcactggtctatggcagaacctgggcatcagtattttttttttgagagagactctcactctgtccaccaggctggagtacagtgacacagctcactgccacctctgcctcccaggttgaaacgattctcctgcctcagcctcatgagtagctgggattacaggcatgtgccaccatgctcagctaatttttgtatttttagtagagacagggtttcgccatgttggccaggctggtcttgaactcctgacctcaagtaatctgcctgcctcggcctcccaaagcgctgggattacaagcatgagccactgcgcctggccagtgttttttaaaggtcgcaagatgattctgacaggtggacaggggttgaacaaagaggcctgtgattgaggatctgggcattcccataccaggccaggcatagctttgacactgacaaggatgtttcccacctgaaccctattctggtgacaggcaggtgactcccaggcccctctgacacctgaacctctgctcccccagaaagccagactcggaccccgaagcctcgccgctctctggccctgaacaagcctgagaagctggtggccccatccccagaccagaaaggaagtggcacaggggggaccactacccctccaaggtgccctgactcctgcggtcacccgaggcctgcatcatcctcacctccaggtgacagaaaaggaggacagtcccagctgacgctgttggatctggccgaggacaccatccactgtgacatctcaagtgggtctctttcctcactctgaacttagtctttcagtaagatgccactctgggggcacctgctgtgtcccagacacagtacccgtagtgggggctgcagcagtgaataggaaacaccgcctcttacttctcaagcttgtggccttgctctggtggtcttcatctcaggctgtgtcgtggctgtaatggggggatgagatcagcgtcattgtcttgtgtgggcttcccatcacagaaccagggaggagggcagggcctccgcctcaggcctcacttggctctcccatgccccagtcactgcactggtttggaaaacgtgtggtgatgctttcaagcagagagctaggccagagggagggaggtcggagctcgaggctttgaggcctcaagtcatctcgttcctctatttgttcattcagccttttctttttttttttttttttgagatggagtcttgctctgtcgcccaggctggagtgcagtggtacaatctcggctcactgcaacctctgcctcctggattcaagcgactctcctgcctcagtctcacgagtagctgggattacaggcgcgcaccaccacgcccagctaatttttgtatttttagtacaaacagggttttgccatattgaccaggctggtcttgaactcctgatctcaggtgatcgcccaccttggcctcccaaagtgctgggattacaggtgtgaggcactgtgccgggcccattagagttttttgtttgttttgagacaaagtcttgctctgtcgcccatgctggagtgcagtggtgcactctcggctactgcaacctctacctcccaggttcaaacaattctctgcctcagcctcctgagtagctgggacaggcgcccgcacccatgcccggctaatttttgtatttttagtagagacggggtttcaccgtgttggccaggctggtcttgaactcctgacctcgtgatccaccgcctcagcctcccaaagtgcaggggttacaggtatgagccacggtgcccagcccccattacagcttctgatagggatgtgggattcaaaaaacccaggggtgatttggggcacccctcagcctcacaccaacgtgacaccctgcatcctgaggtttgggctaggattggggagtgagagggtgtgtggcagaagctggcacccctttgtcccctgcttctgggcttcctggaatttggtccagtccccaggcatggtcatcctgatctgccccttaggctgctggtgccagggcagtgtccaggatgacgcacctttccctgcgctcctggctcaggaagatgtggcgaggatccattttctcaacaagacccagccccatcccaggtaagggcgtccccagggcactgagtgagtggtgctgaggggtttggtctggcgtgggtgaggggtagtgggaagacaggccaagtcacgtcctctgcgggtgccccttgagcaccaatggaggcccagctttgtgtctgccattgtgagctcgcaggaaagcctgacttcccatttcccagacatggtcacagcttcctcaccagtctctttgcctcacctgttgcccctccatcccatcctcatgtgaccacatggcttttccaacacagagacgttgaccacggagtttgtggcttaaagcccttcctcaggcctgcagcatagagtccaatatttttgtttgtttgtttgtttgagacagggtctcactctgtcgcccaggccagagagcagtggcacaatcataggtcactgccgcctcaaccttcagggctcaagcagtcctcctgcctcagcttcctgagtagctgggaccacaggtgcacaccaccacacccagctaatttttttatgtttattttttgtagaaatgaggtccccctatgttgcctaggctggtcttgaactcgtaggctcaagcaatcctcccacctcagcctcccagagtgctgggattataggtatgggccactgcacccggcccggatatttcacctggcctttgagaccttcagtggcccccaactcacctcgtcagccctctctcctgcccttcacccatgactcttatacttcacactgccacacatttgccattccccagaagccctgcgccagcccctctgagcttctcacattccagtacttcttcctggatagcctgcttccctgtgcccctggaaaactgcccatccctcaggctgagcccactgctctccactggctcatcatcctccagcgccctcggtcacagcactgcttacgggctgggctatcctcatgagactgtaagctccctgaggatgggagcctcgactgactgagctttacacccccagcactcccccaggggccagtgcagagtgccaaaggggccccatagcagtttctagcccagagtctgtgagtctgactctgaaactccacctcttgcaggcagaagctggtgttctatgattccagcgaggatgtggacaaagggtccctagacgctgacccttggctccctgcctggaccccagagaacagcccccaaggtgactgcaactctgtctctcctccttgtaggctggtgtgggccttcccatactttcagtctgaggatgtctatggaagagaggaggcgggaaagggaatggagatcccctaagcacagggaaggcaaacacacagtgcacctgccagctctccgccaccgctgccacggaggcttgacaatcaatcaccactctttccttgagcccagacatggcctcagaatcattctgggtctttttggtttgtttgttttcttttttgagatagggtttcactctgtcgtccaagctggagtacagtggcgcagtctcagctcacttcaacctctgtctgctgggttcaagtgattctcctgcctcagcctcccgagtagctgggattacaggtgcccaccaccatgcccagctaatttctgtatttttagtagagatggggtttcaccatgttggccaggctggtctcaaactcctgacctacggtgatctgcccgcctcagcctcccaaagtgttgggattacaggcatgaaccacccctccgaactctttttgtgtttttgttttgttttttcttttgagacaagttctcgccctgaggctggagtgcagtggcgcaatcacagctcactgaggcctccaattcctggactcaagggatcgtcctgcctcagcttctcaaagtgctgggattacaggcacgtgcccctgctcccgacctcagaatccattttttttttttgagacggagtttcactcttgtctcccaggctagagtgcagtggcactatctcagttcactgcaacttctgcctcccaggatcaggtgattctgtgtcagcctctgagtagctgggattacaggtgtgcaccaccacgcctagcaaatttttatatttttagtagagacagggtttcaccgtgttggccaggctggtctcgaactcctgacctcaggtgatccacctgcctcggcctcccaaagcgctgggattataggcgtgagcccccgcatctgacctcagaatctttcttgttgcagagctgcaggtagttataatcagcctatgggactttgcacattatgatattgatttttctttttttttggccatccctgacataatgccaaacatcattttgcttcatttcttcttcttttttttttaaattttgagacagggtctcactctgtcacccaggctggagtgcagtggcacgatctcggctcactgcaacctctgctcctgggttcaagcgattctccttcctcagcctcctgagtaactgagattacaggcacgtgccactacccccagctaagttttgtattttttagtagagacggggtttcaccatgttagccaggctggtcttgaactcctgatctcaaatgatccgcccaccttggcctcccaaagtgctgggttacaggcgtgagccatcgcagccggctgcctcttcatttctgtgatcaagaattcaaaatgagaaactgagattcgctttccgtagcatcaggcactatctcctcaatgccagctgctgtgctagggcagagggtgatctctggccacacccctgagtctgctgttccctttccagggagcccactgttcctggggcctccccagattgatgtctggagtggaacaggccacccaagtgagatcctcgggctcagccctagccttttcagctccccagggaaactgctgccagacgagatcttggaggatgacatggagtacctgacccaaggtgaggcccaggcctggccctgatgcttagttcattcgggaaacatacggtgcccaggcctgcgctgggccatcctgggtgcccggggtgaatcctgccctggccctgcctcaaggagcccacggcctagtgggggagcagccacaggctggtgtggtgcatgggtggctttagaagcccatagcaggacttgagctcactctgtgtgttggaggtgacccaggggagtgggctgtgagcgggatttggacctagggtgggagatcctgaaggagaacgccagagacggggactccggctagcagggacggtgtggctgaagctgggcggtgtgggagaagcatttccactctggctgcccctctggtctccctccctagcggctttctttgaagaagtgtgcttagatctggagtcttcaccttcagcctacacgcaggaggctccacaggaaaaggtagacatcctctgcccctctgtccacagacacatccatccgtctttccacacacgtcactcatggcttcattcactcatccactccctcaccctttcagccaccatctacccatctgtccttccactcatgcgtctcctcatccttaaaaccgccccccgaccctctctgcgctcactggtggccaccagatgccggctctgtgctgggcacgtggaacgaattggacaaaatggataaaaaaggataaaagctgccaggtgcccatagaaaagaaaactcacatcattttattcatttattttattttattttattttattttatttagactgagtttccctgttgtcgcccaggctggggtgcagtggtgcgatctcggctcactgtaacctccgcctcccgggttcaaacaattctcctgcctcagcccccctagtagctgggattacaggtgcctgtcaccacacccggctaattgtgtatttttagtagagatgggggttcaccatgttggccaggctggtctccaactcctgacctcgagtgatccgcccaccttggcctcctagagtgctgggattacaggtgtgagccaccgtgcccagcttcccacatcattttacaactactctacgaagcagggtctcctgtggccccattttacagataaggaaattgaaatcaaaagactaagctgggcgcggtggctcacacctgtaatctcagcagtttgagaggctgacgtaggcggatcacctgagatcaggagttcaagaccagcctggccaacatggggaaaccccatttctactaaaaatacaagaagtgtccgggcgtggtggctcacgcctgtaatcccactattttgggaggccgaggagggcagatcacctgaggtcaggagttggagaccaaccagtctggccatcatggcgaaatactatctctactaaaaatacaaaattagccgggtgtggtggtacgtgcctgtaatcccagctactcaggaggctgaggcagaagaatcgcttaaacctgggaggcgggggttgcagtaagccaagatggcaccgttggactgcagcctgggcaacaagagcgaaacccagtctcaaaaaaggaaaagaaaaagaaaaagaaattatcagggtgtggccgggcgtggtggctcatgcctatacttctagcactttgggaggctgaggcgggcagatcacctgaggtcaggagtttaaacctagcttgaccaatatgatgaaaccccctctctactaaaaatacaaaattagctgggcgtggtggtgggcacttgtaaccccagttactcaggagtctgaggcaggagaatcacttgaacccaagaggtggagaatggagctgagatggtgccattgcactccagcctgagggacaagagtaagactccgtctcaaaaaaaaaaaaaagaaagaaaagaaaaaaaagaaaagaaaggaagaaagaaagaaagacagggtcttgctttgttgcccaggctggagtgcagtgtcaccatcatagatcagtgccttgaactcctgggctcaaatgaccctcccacaccaccatgcccagctggttttttaaattatttttaaatttaacttaattcaatttctttttttttttttgagacagagtctcactctgtcacccaggctggagtgcagtggtacgatctcggctcactgcaacctccgcctcctggatttaagcgattcttgtgcctcagcctccagagtagctgggactacaggcgcccaccaacatacctggctaattttttagtatttttagacagagtttcgccatgttggccaggctggttttgaactcctgacctcaggtgatcctcctgcctcagcctccgaaagtgctgagattacaggcatgagccactgcgcctggcctattttttttttttttttttttttttttttgtagaacaaggtctctctatgttgcccaggctggtctgtaactcctggcctcaagcagtcctcctgcctcagcctcccagagtgttggggttacaggcgtaagccaccacaccctgccaatctgagctgctgctaatgctcatgttatgtcctagaaaagcagtactggggggatgaaggggcaccacttgtctcccctcccatctttctccctcatcatgccccaggacacagcctccaaggcccccaaagaccctcctgagtcccacagcctgcaccggtcctcagtctcgctggaccactgctacctctcgctgagcgggaacagcaaggcgccatccagctccagctccagctccagctccagctccagctcggaggacagcgactcggagcccctgtggaagcagcgagaggtgagagacacggccgcatgccagggccagcagggcctccttcctctctcaccaccctctccctcccccaggatatgcaggccaaccctgtgggcacgccgggctccagcgaagaggacgaagacaccacatggacccccacccggctggcctcacccctgctggcagctgagaaaaaggccacgaagggccaagtagccagggcccctgtgaagcccaaggagaagaagaaaggcccctgcccaccccagatgaagaagaagtgtgtcaacggcttcatcatgttctgcaggatgaaccggaagcagtacatccggtgggtagggggtcgtctttggccctggggaaggccctggcttcgttctctgcccgcagcctggccatgccgctcctcacaactgtctgacactttttccccctccgagaccccacaaacccttcgtggaccacagttcttccccagaactgaacccggccccattgtattggacagggtccatccattgtcagcgctgaaacccaattcaggctttagacttcagaaaaaaaggagttttttttgttttgttttgttttttgagacagagtctcactctattgcccaggctgtagtgcagtggcacaatcacagctcactgcaatgtctgcctcccgggctcaaatcactgcaacctctgcctctcagattctcctgcctcagcctcctgagtagctgggataacaggcgcgccatcagctaatttttgtatttttagtagagacagggtttcaccatgttggccaggctggtctcgaatgcctcacctcaagtgatctgcctgcctcggcctctcaaattgctgggattacaggtgtgagccatcaggcccagcaagaaaagaaaatgaattggcttatataacctagaaaacaagggcgggtatagactgccttgagacatagctggttttagggctcacacaggctgtctggaatctttgtccttttcacccagttcctctgtcttccgggctggcttcattctctggcaggtggggtcaccccaggaggcacaggctcgggtcctgtcccccacccaagcgaccccgggaggaggagaggtctctaaggttttaagcaaagtccttgggactgactttggtagatccggtgccaaccctgaaccagtcactgccaggcctggagccaggggatggggaggccccccccaagccacagtggaaaacagctagttcctttacaggaagatccagatgtgggggccaggagcggtgcccacaggtcccctgcactctcctgggacaccaggtgcccccttgtgaacagccgctgagtccagctccctctgcctcctcagctccagagggtggtcttggaggccttgtagacccacaaggctaggaagggtctgagttctcagtcagggtgtcctgcagacctctccttacctcctcctccttcctgtcccagatcctgccctggaaccgcttccacagctgccaccaaggagctggcccagctgtggcgggtgatgacccagcaggagcggaggccatactggtgagaggctccggccccgaggtgtgggtggggggtggaagagcctccctaccccggaaccctgctctgtctctggagccttgggtgtcatggcatgggagactgggccgaggaatttgcgtgttgccccttcttatgaaacccttgggggtgacacaggtgtaggggtaccccaccacagctaagctggggaacagctgagcccagacatggacccctgcctcaattcttttgctgtctctgccacacgactttctcggggcgtggtctgattttcctgtcgcttggccacctcgactcccccgaatcctgtcccctccaccttcaaggagctgccacctgccctggctcctgactttgaacacatcccagagcccttggccgagtcccatcttactgactgggacttggtggacccaaggctcgcccaatagaggctaaaacggtggcccaggcccctgcggggacacaggattgggagtggtacagggatgcccgggaggcgagtgaggaagccaggccatcctgccaccgtctccccagcaccaaggctcgcaggttcagccgccagcacaaccgcatcgtgaagcaggacggctccagcagcgaggctgaggactgggagacgccaaagcccttctaccagctgctggccgagaaggccttgccgctgcccccgcacctccagtgagagggcggcccctcgcctcgctcccctcacccctcatggcaaccgcggctcttgctggaagccaggacccatcgatgaacttgtccctcctgggcctccagcccctgagaatgcaggtcccatgggactggggaggggggcactgattagccccaaccgctgggcacatttgcctggagcaccagagtcacccacagctgccttgattctcccccaggcttaggaaggaaacccaaaatgaaatgcggggtgtcggaaggtgaagtttacccacccctctccccttcccttccccaccccagagccactcggttgcaaccctgttcatgctcacctcaccctactcctccctctcctgttctatttttagactatttattgttttaaataaaataaagcaagtggaacctttgttaccagcaagagagacaagggcaggccctcctgcgtccccctgctgccccactggggtgctccgtccaccctcatctggaggcctgtggcttgcaagaggcctcagtgccaccccctccccagccactctgtgcatctgaatgcaaacccctcttcccctcgggaggcagcaatgggaaggccaggtctcgaggtgggctctgtgttcagcgctgctttggacagacactggaaggcaccccagacccctggtggtggtgtaatccgataactttattttaattgaaaatggaggcataacatgtcctagaaaaataaagatttaggatacaaaggagacacagcggcagggctgcccccagggatgagggaatctttggtctgggccggataatgaggacaagggcttgagtcgaggggagctggtgaaggaagacccccgtctccccacagctgccccaccccccgcccctggcaggaaatgccacactggggagggtctccagtctcaggggcgcggggctgcctgtcctccaccttcggattccaggcagttgtgacaacaccagctatcggcagagctattaatagtgtttcagggagtgacagggagagggctctgggggctggaagtccggccctggggcagggtgttccgcttacagctagtaccaagtggagggggcagggcccctgagtcaggaccctgagtcccccacgtatatggcagggcacagcatggggagggctgtaacagagaggcctcccatccaaagggggatggagacctggacaggaggtggccggggatacaacccccagcaccaccagggcttggagaggccacccaggcagaaggatgtggtgactggggtcttcagcaaccgcatttctggggctcccccctcccattcctgtccctgcgtcttcagcaccaatgtcgggagaggccacggggccacactgggtcacagttccaagggctcctccacaggcaccgactggagctgggtcagaaccttggcctcagcttccaacccctcgtcaacctcaccccctgcggtggcccccaggagcagcccctcagggtcggggtctggcagcctcagcacggtgtggggggcctgtgtccccagccccttttccgcttccagcagcccctctgttcctgcgcttagttccagccctgctgaccagacaggcacggccgcgggtgacaacatcagcccctctggtgggggcgccgggaagttgggcaggaggccaggggagtcaggggagaagggcaggctggtgctggaggtggtggcagcggcggggggtggctgctgtgcagaaagggtgcctagggcgtgagcctctgggagagcagggctgggggccaccgggaggcctccctcaggcacggagatggccgtctctggcttcagtggcagggccaggccgggggctggcggcaggacctgggagacgagcatgctggtggggaaggtggcggtgaggatgatcttgccctgctgcagggccacacccgtcacgatggggctgccagacacagggttggccaggaggaagtttcctgtggggagagagggaccgagcgcaggtgagagccaggagagcaggccaagccagagagaagtggagactgtgcagctggagggcgggcggagggagccttgtggtgggccttggggcactgggacttgccagggatgagatgccctccaggagcccagggacagcccctccctctccgagatgactgcacccctccccggctctcacctaggcctgagggagggagatgggggtacctggggcagtggccgaaggcagctgcagggcagtcacgcccaccccggagttgatgaggtgcacattggcagggcctgctgcagctgccaccttcacagggctgcctggcccggctgccaacagctgcaggggccccacagcctggggcagggtcaccacctgtgaggtgggtactacctggggcaggttcaatagtggggaggtggggctcaggcccgtgggataccccgggggtggggagagcggtaccacttgtggggcagccacagcaggcactggccccgggggcagaggaaaggtggcagccgtcggggggccaggcaccacttgggccaggggccccaggacctcctctccaagggctggtcccggagcagccacctgggcccctttggtctcaggggcctccgactgagcctcctccagccgcacctcccctgtctgagggtccaggaccagagaggtcttggtctcgctggccccctgagggctgggctgcggtggaggggcacccccgcccccagtgagcagcagcgggcccaggctggaggcctcgcccagggccaggccgttgatgatgacggggcccccgttgaggagcactgctggggagccgctggctgccaggaagctcccgttcaccaggatggaggaggaagccgggcaaggcgcgggagggccggtccctgccaggaatatggagccctgggcagcggcctcggcggacactggggccgcccctctctccaggtcctcaggacttcggctggactcgtcctcagtcgtgggattcccatcagactcgctggccggagaaatggctgtcagctggggtcccttagcctgtggggcctcccgcatagccagccagctgctcccccacctttccctggcccaagtttcggtggatcattccaggggttatgacgcctctctgagaccactccaaactccagggccttttgcaagccctgcgtggacaccactgcagagaagcgctggggagggaagaggcccttgctctcccccacctcggcctcgggtccccagaggctgagctcccaggttgccctaaaagttccttggttgggcggaaagcgggcgagtggcctggagagagggagcagcagccgccagcccagttcccggtgccctccccgcggggcgtcagagaagggagaggccggcgctcagggtgggaggagaagggtttgggttacagggaaaccggagctgggaaaggttcacgtttcacaacaaaggcagaagacggaccacgccgtccgggcccggagggagtgtgggggcgggtgggtaagagtaacggtcagtgaagaaagggggctgggaggcagcccctacgcggagtggagtggccacaggccctgtcctttttcctcagtccctctagtgccccccgcagtgtgattccccaacaccgatgggatttgggaaggagctcggaatggagccgctggaagaggagacgcgtgcggggagagggcccgggcgggtgcctgtcccgtccacacttagtccccgcgccccgcgggcgcctgagattgtgagctggtcccgggagatgtccgaggacctcggcgcgccggccccagcagtgggcacgggggaagagggctggtggacgggatgtccccgggagagctggacttgcgccgcccgaggcccctcacctcttgcagggcgcgccgcctccggccccggtccggtcgcgctgtcgccggttcttgaaccagttgctgacctgcgtgagcgacaggccggtgagtgtggccaggcggcgcttctcgtccggcgtggggtagcggttgccgcggtagcaggccttgagcgctgcgcgggagcgctccttgaagcagtagactgtctcctcgccgtcccagatggtcttgggcagcgggaacttcttgcgcagtcgatacttgtccactgcgccaagcgcgcggccgcgggcccgctcggcctcatggtagcgcgcgcgcaggtagaggtcctgcaggaaggcgtggtgggcggcggggaaggggcggctctcgagtagccggtagagctcggcgtactcgccccgctggaaggccaccagggcccgcgcgcgcaacaccgggtcgctgccacgtaggcgctcggccgggggcagtgcgcccaggaagcggctcaagcggccggcgtggcccgcctggagcagcgcctcgcagacgcacgccacctgctcgggcgagaagcggaggcccgtgggcggttcggaagcggcctcggggggcgacccggggacgcccggggatcccgggccctcagctcccgcagccgctgcgcccgccccggccccggccgccgccgccgcctcaccctcggccgcctgcaaagtctgcaagagctggcgcgcttcctcctcctcctcttcggtcgccgccgccgccgccaccgcctcccccccagccgccggccccgcgctcggctccgcaggcaaggtagccatgttttgcaactttgggaagttcctccctccctctcttcctccctcgggctttccccagcctcctcccccacctgtccccccttttcgcccccactccccgctcttctcgatcttctttctggccgaccctgcgccccacgccgggaaggcgagatccagctctccactcgggtctctgtccccttgtgtgtgtccgtccccctcccgtctgtctgtgattctccctttgttttccctccgcctctggccgcgctttctgcctccccccagcgtgtgcttctggctcagggcctcagtttccccatcgggacaacgcagaaggtaacgggccgtccaggaggactaagggcgcgaagcctccgccccgagactgagcttctgcacgcctccgtctccagggtcctctgcaggcccccacattccccatctcggcctgcgctccgcccctcggaattcccggctccgcagggggggcgggtctggccgggaggaggggcggggaacgggctagaaagtttgcagcaacttttctcgagcttgcgtcccaggagcggatgcgcgtggcgtgcgcaggcgcagtggaaggaggatggccgcgcgcgctgccagcccagccccctcttctcgacgctcggtggcacagctgggccacagctgggcgggggcggtgcctccgggtggcccgctcgccctcctattggccggacgccaaagccccgccccgtggcttttcctcccccaaccctgattcggccgcttcgcatcccgctagctcctcccagaccttcggccgcctccacacgcctccggattggcccgctgcggagcctccggcccacaacgcaaaccgcggacactgtggagtccagagctttgggcagatggagggccttttattcgcgagggtcgggggtgggggtcctaggtggggacagacaataaataccgaggaatgtcggggtctcagtgcatccaaaacgtggattggggttgttgggggtcctgtagcctgtcagcgagtcggaggacgaggtcaataaatatccaaaccgccgaagcgggcggagccggctggggctccgagagcagcgcaagtgaggaggggggcgcgggatccccgaaaaagcgggtttggcaaaagcaaatttcccgagtaagcaggcagagatcgcgccagacgctccccagagcagggcgtcatgcacaagaaagctttgcactttgcgaaccaacgataggtgggggtgcgtggaggatggaacacggacggcccggcttgctgccttcccaggcctgcagtttgcccatccacgtcagggcctcagcctggccgaaagaaagaaatggtctgtgatccccccagcagcagcagcagcagcagcagcagcagcagcagcagcagcagcagcagcagcagcagcattcccggctacaaggacccttcgagccccgttcgccggccgcggacccggcccctccctccccggccgctagggggcgggcccggatcacaggactggagctgggcggagacccacgctcggagcggttgtgaactggcaggcggtgggcgcggcttctgtgccgtgccccgggcactcagtcttccaacggggccccggagtcgaagacagttctagggttcagggagcgcgggcggctcctgggcggcgccagactgcggtgagttggccggcgtgggccaccaacccaatgcagcccagggcggcggcacgagacagaacaacggcgaacaggagcagggaaagcgcctccgataggccaggcctagggacctgcggggagagggcgaggtcaacacccggcatgggcctctgattggctcctgggactcgccccgcctacgcccataggtgggcccgcactcttccctgcgccccgcccccgccccaacagcctacagctgttgttagtccactcgcacgcctcgaatcccgtccgaactcgtcattggctgcttcctagcggcctgtgttgattggctgcccgaagatccgccctcctgccgtgggcccagccccgcaaatgcgcagctaagcgggtggcaaggggcgggtggagcgcggggcgcgacggcggaggggggcgtgggcagccggacgtaccctggcagggagcagcaggtggcggcggtgcatggggcctggccccaccagcgggcactggcccacagccacggccggggggccatctagctggagagagaagggacaggtgacccgatcggagcccagcccagccctcagcggtggggcgagagacagcgaggggaatcgaggttggggaggttatctagggagatcccggagggaatctggtgaggcctgaacggagggagatctggggctgaataaagggcttctgccctctaaagtcgcaaagacgtagggtgagccctatatctggacggggagaccaggagccagggaggggatctgcagaatgggcagcaggtctgaggcaggggaaagagaggggtcttacatgggaaggtggatccgtggcccggggactggggacccccgtgacagctggaaggagaagaaagaggcatagggcgcgtggaggggcgaaggagggcggtggcgcggcgtgccccagcgtgggtcccttccctcctccaggtgtctatacacgccccgcggagcagacggcccacctcctcccggtcctccggggaaggggacacatgagggactcacctgtggctccctctgcctgcagcaactccatccgctcctgcaactgccggacgtgtgcctctaggtcccggttccgagcctctgcctcgcgtagttgactgtggggaggtaaggacggtgagtccgtccgggccggacgagaggggatgccaagggttgccaccggcccgcatcccggccccggccccggccccgatcccgacctggcgaagttctggttgtccgtgcggatggcctccatctcccggctcaggctctgccgggtgagcacctcctcctccagggcttcctggagctcccgcagcgtcacctcggcctcagcctctgccgcagggacagccgctggaactgccacttcagcctgtgtatggggaccaggcttaaggctgcctgtggctcctggaagactcaggacttgggcactggttccaggctaggaatccttgtttatcccctactcctccgtcccctcaacatttctggaatccccatagctcctgcaatgatccaagccccctcccttccctacctccctcagccccatccctgagtctggtcctctaaatctacacagggaccagagggctggtgctcaaacactaacacaacctatgtccctctgctgctcaaaatccctccagctccctaatgccctcacgacaaaaggccttgctgggttttgtttcctgctggcctctccagccttctcaggaatgattcagccaaactacctttcaggaacaaatcaggattcccacctgcccaaggcctttgccctggaggctctcgcctgaccacttggcacctttccttccatggcttgtttctccttcaccagcgctcagctcaaagatcgacttctcagatccccagcaacacacacacccttacttaatgccccactgtaactacagagaccgtcccatgtctgaagtaacctcgtctctccgtggtttctgtctgcttctgttcaggaagtccctagagggctctacagtgcacgccacccgggaagccctcaccttttctctcccaattgtccctgacggaccccctcccctccaccaacttactgtttcatcctgtggggacaccgagggctccaggctgggcgcttgcacgtgtggctcaagcagctgctcggcctccagttccatgggtgtggggcctgggacctcactgtccctggggagaggaggagggagtggggagggagacagaatgctgattctctggtggagaaccagaacttctggcctgtgggtaggggcagctgcttccaagacctcctgatttgaggaaggggagcagcagagcgaagagaacagagtcccaggtaggccaatagcccctcctctgcttaggaaaagccctgcccctctcctggccttgggcccctgggagctgctctttctaaaccttctgcagggacttggggtccagacccccatgttctagggtcagctcatctcctcccttgacatgtgaccgctgcagacccctcttctcagggcctcaggacagggaggccgacctgatggggagactgcttggctctggccacctccacagatgtggtcctaagactgggcatgggaccccaagatggcaacttgaggtcagcacaccccactcagctgtgggaaggggacagctcctccctggggtatgaagtggctgtcccctccaacccagcagtccctcctgtgggaacacggctcaggacctagctatcctggacatgcgcctgggttctaatagaggatgggttcaatcctgacccaccgttcaggccccgcagcggttcagaatcaagctggagttcattaatgataaggtatagtatgtgtaatgttgtccagtaataaaagctgactagaaaaccaactgttctcttagacaaagtagcatgaggaaggggaaaaaaacaaaccaaaaaaacacctgttctccactatttaaacatgtgtcagtacacgtgtgagccagggaccactgccatctggtgagctcacgagatatcaacttccttttccttatctgtattttctaatttacttgtgataagcaatgcattatttgtgtaattaatacttttgttgagaccaggtctcactttgttgcctaggctggaatctatcatggctcactgaagcctcaaactccaggctcaagtgattctcctacttcagactcctgagtagctaggactgcaggcacagaccaccatgcctggcacgattttttcaattttttgtagagacagggtctcattatgttgctcaggctggtcttgaactcctgggctgaagcaatccgtccacttcagcctcccaaagtgctgggattccaagcgtgagccaccatgcccagcctgtaaattagtacttttttttttttttttttgagatgaagtttcactcttgttgcccaggctggaatgcaatggcacgatctcagctcaccacaacctccccctcctgggttctgattctcctgcctcagcctcctgagtagctgggattacaggtatatgccaccacgcctggctaattttgttttttagtagagatgaggtttctccacgttggtcaggctggtctcgaactcctgacctcaggtgatccacccacctcatcctcccaaagcactggaattacaggcgtgagccaccacacccggcctaaataaatacttttttttttttttttttgagacggagtcttgctctgtcgcccaggctggagtgcagtggcatgatctcggctcactgcaagctccgcctcccgggttcatgccattctcctgcctcgcctcccaagtagctgggaccgcaagcgcccgccaccatgcccggctaatttttttgtatttttagtagagacggggtttcaccgtgttagccaggatggtctcgatctcctgacctcatgatccacctgccttggcctcccaaagtgctaggattacaggcgtgagccaccgcggcccgcctaaattaatacttttaaatggccttattgttatatggctgattcaaagaatttgcattcttttacaactgattgtaaaagtctaaacttcatattttccaagttctgaagtcctgtggctctgtgtactacagacgtaaaagttaatggttacaagattctgggaagcccagtctgtgactctgaggttttaaaattcaatctaacattttgaagtacatagatctgaaaatttaaggtcctccaactctggcctcttaggagtctttgggcccaaaacagtaaggttccaagactgatcctgcaactccattggctgccaaggagcaggacccaggaagctcaagcagcctcgtggcccctggaggccgtccagggcagtgcttacctgagggccatgcaggagtaggagtagcccacaaaaggcaggtggacccctagcggcgcaccttcccgaatgtccgacagtgtctcctgcgcaagacacacagatgtgagcagcagtcgtcagggcgggcccctcactgctttttgatcttggcttacatgttccccccaaaccagccccaactcagggcttatctaaagtggcccctccagcattttttcttttttctttttctttgatacggagtctcgctctgttacccaggctggagtgcagtggtgcaatctcagctcactgcaacctccgcctcccaggttcaggcgattctcctgcctcagcgtcctgagtagctgagattacaggcgccctctaccacgcctggctaattttttatatttttggtagagacggggtttcgccacgctggccaggctggtctccatcttctgacctcaagtgatccgcctacctcagctgttgtagtcccaaactctgggctcaagcagtcctccaacctcagcctcccaaagtgctgggattacaaatataagccactgtgcccagcccagttctgttttttttttttagatggagtcttgctgtctcccagcctagagtgcagtggcacaaccccagcccactgcaaactctgcctcccaggttcaatcaagcgattctcctgcctcagcctcctgagtagctggcattacaggcatacgccaccaagcctggctaaattttgtatttttagtagacacagggtttcaccatgttggccaggctggtcttgaactcctgacttccagtgatctgcctgcctcagcctcccaaagttctgggattacaggcgtgaaccaccttgcccaacccttttttttttttttttttttgagacagagtctcactctgtcacccagactggagtgtagtggcatgatcttggctcactgcaaactctgcctcccaggttcaagcaattctcctgcctcagcttccccagtaactggaattacaggcacccgagaccacacccagctaattttcttgtatttttagtagagacggggtttcaccgtgttggccagcctagtctcaaaactcctgatctcatgacccaccggccttggactcccaaagtgctgggattacaggcatgagccacagcgcccggccgcggtccagcctatttttttttttttttttttttttttctgagacagagtctcgctctgtcgcccaggctggagtgcagtggcacgatctcggctcactgcaaactctgcctcccgggttcacgccattctcctgcctcagcctcctgagtagctgggactacaggcgcccgccaccacgcctggctaattttttgtatttttaggagagatggggtttcaccgtgttagccaagatggtctcgatctcctgacctcgtgatccacccgcctcggcctcccaaagtgctgagattacaggcgtgagccaccacgcccggccagcccagcctattttttaatttcagtttatcttatttttgagacagagtctctctccgttgcccaggctggagtgcagtggcacaatcacagctcactgcagccttgacctcctgggctcaagcccacgtcggccaccctagtagctgagtatacaggcatgcgccaccacgcccaaccaatttttaaaacatttttgtagagacgggggtctcaccacattgcccaggctggtctcgaactcctgggctcaagcaatccacccacttcggcctgccaaattgctggggttacaggcgtgagccaccgtgcctggccccatcattttttcttgtatcctgttgcttcccttcagggcacctgccacactctccataattctctaattctctagactgcaactggatgagggcagggaccagagctcatctggtccgtgctggatccccagtattgttcagcaaaagggcacccagagccgagcaagcatgccatgacagcttgttacacggtgaagagagacggcctaagggaggaggagtcctctcctgcttctcatccctccaagtctcagctcagatagctccccactccagaaagccctccaggaccttccttgctgagtcaggagtcccccaccccctgcactccattgtctcagccctgatcactctggggccttactgtctgaagactgctctgtgttcccccactggactgtaagtctaggtcactgctgggtcctcagtagtagatgggcacagagcaggtgctctggggaatgagtgattcaggaccccagaaggtaggcactgtccttactccaactttatggagggagcatggggaggttcccgcagccgagcaggggccacaggtacctaccccgcccccgctcaccatggcagtgagcccgtcctccaccaagtcgaagttgcatgtgtcggtggcaccttcgaaatccggtgtaaaggggggcacgctgtcccggagaccatcccagtcgaggccaaagaagaagggatgtgtccggaagtcgcctgctccaccccggcccagccgtgtctccgggggacacagcaaccgctgaatgaagtctcgagcctcctcagggaccccttcgtccaccagcggcagagagaggtgctcctgctcagagggagaggaggcgatagcctgggagcgcctaccgggagaggccaggtctccctgcggccgtgctcaccttgtagtggacgatcttgccataggtctccgccgtggaatccgcgtagaagggcgtctgcccatagaacatttcataggcgaatacacccagcgcccaccagtcacactcgggcccgtagctgcctgtcccaggcccaccgcccacagcctgcaggatctcgggggacaggtagtctggggtgcccacagccaccagcgaccgcacctggaccaaaaggagcagagcgaggcttgggcccacccctctgggcccaccagctctgggccctccttccaaccactccccaaatgcttagcccctccctctgcctggtctaatactccgccacacagatgcacacttaagcctgggtcacaccacctcttttcccctccaaatccagtcccgctcccacactctgtgccttccatccctcatcagcagccccagttgctctgtggccagggcactggctcaccgttccatctgcccgcagcttgaggcaagagccgaagtcggccaggcggatgtggccacagcggtccagcaggatgttgtcgggtttgatgtccctgcacggaggaaaagagaagggtgggataaatgaacctcccttctgtggtcccaccaggctccgcccctccgggcagtgccacctgggaccccacttcctcgggttccgcccctgtagggcttctacagttctgacccctactcccaggcaccccccggtgggccccaaccaagaaggtccctctccaggccctggcctctctgggctctgaccttccaagaacccggccagggaacaagcttgctatcccctcggccatgctgcacccacctgtgcacgtagccaagccggtgcaccgagtctatggccatgacaatctccgccaggtagaagcgcgccatctcggccggaatccgctccccaaacttgctcagcagtgtcagcaggtccccgcccacgtaatactccatgaccaggtactgagaaggggttcgtcatgggtggttggtagtcccctgaggccctgatccatcacggatggctgggacaacccctcccagagacaccccatccttgggcagagacctgcagccccagcccagagataaccatagagatctgccgggccaaatcagagaccacctgcggcccccgcccccgcccctcaaaaaaaaacacaaacaaaaaaactttcctgggatgtcactgggcagattcactccccctgagatgttctgggaaagagaacccagaggccacccaacacccagagaataggtcccagacactccttccctaggcagtggccccgttagaattcctgaagacctatcccattccaggtaagagaccccccgcaacagagacatctttataagagtcccccagatcaccccagaaacgggcagtgaaggacaccatccccgtctcagatagggaaggcccctcatccacctgacacaccctcttaccgcacacagactttcccacagacgtttccgggcagcacccccaatcctagagcttcctctccccacctcctcgtccagtgacagcacgggctcttgtccctcttcctagtcaccccggcccggagctcaccaggtagttctcatcctggaaggcgaagtgcagctgcgtgatccaccgccggtccccattcaccaacacgtccctctcctcacggaagcacgacacctgcagggcacccggaggagctgcagccggagacggggcgcggatcctcaaagccccccacgtccgcccagcccctcacctcgcccctcttcagcatgtcccacttgttcatgatcttcatggcatacacctggcccgtctgcttcatcttcactaccgctacctgaggtcgagatagtgagacagagtggagacggcgggaaaacaaaagggctcgcccagacccaactccacccgcttctgcacccagccgtggccccgccccacctgccacaccacgcccattggtcccaagccccgcctccagcccagccctaggttctaaggctcggtcattcatcaatttctaaggccccgccccaacccctatgccccgcccaccacgagtcaagtcaggctcccgcccggttcggcttacctcgctgaacgccccgcgtccgatcaccttcagaatctcgaagtcgtccctctgcagtcggacctccttaagcctcaccacgatgggctccgctgggggggtggtgggggaaaagaaccgagggtcaccagaaagggcactggagacaagggggaaagccccaccctctgtctgtctccccttctctctgcctctcagcttcaccctaggactgtctgcttcccaggggcttccccacataaacaccgtgtaaggttctgggggccaaaaatgccctcccatagaggtgagatgcctgagaagccctttgcgggacagggcattggcccagagggctccaagggtgtgcaggatggttagggtggggtaacggagtctgcagaaggacagaccctaaagaacaaggggagaaggaaataagacccagttcttccaccttccaccctgactccaggtgacagttcaggtgcagccagggccccacccccacgttctcatgtagaatgtcctgggtaacggcccagacgtggggttgtatccagtacctctagattcagatgcaggtggttcttgaaccacactttggaaaaccctggatttggggctgggggaaggaacaggacagggagacaaaggtagcatggtcacatatcccagactcaagtgctccggtccagcccatctctcagtcctccaggaggagtgctttagtcctaccccttatttacagatgacaatcaggcctctcagaagtcaaggtcctatgactaggaatgttaaactgggcagcctgggtgggggaccagctggggtggaggcttgtggctcagggactgtggggacagggaggcctggactcccgggggtggaagaagtggaggcaggatggagagagggatgggtatgggaggggagggaaggagaggagacagtgggttctggaggaaagagaggggttccggggggttccgggagagtgggccagcagggacgaaccagccagggctgaggacgggggagggaggagagagccaagacattgagcccttttaaggcagcaggaaccctggccccctcccccgccccaggcctggcaggggaggggccgcgagatgcagctcgggccacaaaaggagtgctcctcccgggagcgccagacccctaccccacccggtctcagtttaccctgccaacccaacttcatcctctactaaagggaggccaggagagtcattaggggctgtgggaggttgggagaaggtttttccagaggctgaatggcctggcccttcttggcctccaccttcccatctgtgaaatgggaggaggagggaaaggaaccaggcctgggtcagaaagagatggacacaagaggaagcaggggaaggcggagaaacaggaaacaagtgtcacacacagtttgttacacacaggccaaaaaccaaacaccagtcactgagggccagacatatgagggccagaggggcagggtgctgggaatgaaagaaaccagtgaccagtgagcccgagtcctgggcttggggaggaggtgggcagacaaggcagctggcagaagcggaagcatcctccttccagccctggccccaggccctggaaagcccttgcaagaaggggttttgtgggacagctggaaggttggaggccctgggccaggagaactaaaggacgcagggacccggggtggcgggaatggtggctgacccacacggctcataggaaccgagactttggggctgggggtgggggtgggtgcagaacctacaaaagaaggagacacacccagaagaacccaaagttgtccctcctggatcgcagaggagggggcactggtggcgcctgtctgcaaagctggttctcccacagggcccgcgtgagtcaccgccctcccagtgcctgggcacctgttggggcagctggagaggctggcgccgaacacctgcctgtcggctgcgcccctggcagctgccccatgctggccctcctggcttgccccaggccacaggaaaccaggggagagggccatagagcccacttttggggggagggtcctaggagagggagctcccagcatgaccctgaccctgaccctgaggcggggtgcagagaggccatgggaggctgttggcagcctagcctgctgtgactcctaagccatggctctgagtcacagccaccctagcctctgctgaccttactctgcccctccagagtggtggcataggacagagaaatgttgccccagggcccaggtccacactctgagccccaggatgggaggatctccccatgcccatcctgccatcctgcccccccaacagccaggcctctgtgcccagacctgtctcctgccccacccccaccccatctgcaggagccccgagggtaggcactcaccccactgcaagaagtcggccacgtacttgtcctgggccagttcggaggcgcccagctcctggtggacgcccaggagaaggtcgagcaggggctccagccccaggaagcccgggtccaacaccagctgctggagccgcctcagccgcacctcggctgacatgttggacaggcagcaccatggcccctccccgggccgggggctcggggtcctcctgtcacagggcctggcagcccctgtccaggccctggagccctggctgcatgtctgcctgtccctggctgtcccctgggcctctctggccacttctctctgcggccggccgaggcctcctccccttctccccaccccttggtccagcccccctcccgcctcccagccttaacccctcacaagccagccccccaagctccctccttccagggcccttcagaacccttcagtgctagagtagggggaatgcatggagaatctcagctgtcacactgtcaccccaataaaaaggtagagcacagaggaagccacaggtgtgatgaatttcaagaagaacctgcccattgctgaaacagggccaattgaggctgagtgacccagtagcaaccacccccttgctcccgacaagctccagaactgggggctagggggtgagggctgggggttggggctgggtgggagaaaggggttgaggcctgggaaggggacgggaggccagggcagcttcttgggtgactcagagatggattccgactcggacagttaaatttagccctcaggctctctgctttataccagctttttttttttttttttttttttttcccaggaggtggggaaggggtggtgaggacaggaccaggagggggcaccctcagagcctgaacaggggtgacctgctgcccaaaggctgggggaggaaagtggtggagccaagccctccctgggcaaacgagaccccaaaatagctccttggcccctggccggggagccacattcctgcccaggctgggattagaaacagaaacatttcggggggtggagggtggcgcgggaagacacactccctgcggctccgagagccaagaggaatctgagctcttctttccagggtggacggttctccagagtggaagtcggggcctccaaccggcctggggtgcctgggccttgagagggccaggcctgagaaactaggaggcaaggaccgaggagtcccagctgggcagggcctgggaaacgtggtcctgggcagttctgataatttaaaaaacaccgaggactttgatgaggggccctggctgcgggcaggatgctcttctccccaagagggtcctgctccagccgctggtgtgggtcaccagttgtgtgactcgcaggtccgttccctccctgggctccggcttttcctgctatgaaaaggggtgggaggcgctgggctgggagcaggcctgcactcctcctctggggaaagcggactgcctagaaccacagagtacacacacaggtcctctacatcatctcctccgaaggggacagacccgctgagaaaacagggaactttagtataaataagaggtcctgcgggacagggaggaacctgaggggcttccataatttaacactcttcaaaagcacagacaatagcaagggcagctggggtgggggccgggcgagggctggaccacccccggccctgcccactcaactgaggggcacactgcagacctggggctcttgtggcaggggcggggagtctctccccaggagtgaccagtcacatgctggggacagggatgagggtaacactgatgtttcagaggaagaggtcattgtacttggcagtgggtgggggacaaggctgaggccacaagggctattacatcgcccgtgtccgggccagtctggggggcccccaaattttgtgcaggtggggggactggagcagtccatccatcatggttagtcttgttaatacgttgatctgtgaggtcagcagggagggttatggctaggaggctgggggcatggggttgggggggcccgatatccatggcttcacaccactgtgccactcggggagttgcctggttgggaggagatgccctggggaagatgagagggagagatgggaggggttagagaccacctgggcttcagccagtgtcaaggggagggagccagcccagagtccccaaagctgctgccaccctggccttgcccttgggtccgccctagaccccccagaggccactgctctaggctgggaacttgcatcttagctagcttcctgtcctggcagtcagcactttcacgcaataatcaaagtccttggcggatcctgagtgagaccatggggtaagggtaagggtgggaggggagggggaaactggagctcccttctaacttgggagggaccctgaggtgctggggaaagaactcagggacagtcctacctctaccactgacttgctgggtgacctgggccaacttccttcccctgtctgggcctcggtctcctcgtctgtgaactacggagacagaggggtctcttttaggactcaaccagactccccaaatcccaccactcttgcctctgagtcactcagactgtgctctcaagttctagggactcaggactctacgattccaaaactgaggatctgaggaaccaagccacggcctccaggaccctgggcaactgagtccaagccctaagaagctgagacacccaagacgagctccgaacttacaagatgccaggcctgattcgcctactatgaccttcccaacgccacagcccacccaggaggcaagcacatccacccactgcccatcctacaggctctgttctaagaggtgatgagttggaggtcagagggggcagtgacttgtccagggtcacagagggagtgggactggaacccaggcctgggattcccagcctgtgccttcagcaggaggctcagatcctgagtcccagacccaggctggcagccatgcccacaggcttgagctcgcccctagttttggcctgaagtactcaaaaaagtttcacgatttaaaaaacagatgttcaacagaaatagattctggttcgagtgacaggcagtaagacctggccatgtggggcccatctgctgcccttcagacggccagccttggatgccccaattcctagctggctctcacacccacccctctttctgctgcctgctgcctagggctagaccccctcactctaaggatctgagaggtcttgtactgagacactaagatttccctggcttcccctcaccccacggagccagaggctgtgacagcaacaaagccctctctctgccaatgcctgcctcttcccacgaaaggtcctgccaggtccccggcaggctggtgtggggccactcaccgccttgcccggccgggcccaggtgcagatgaggccctcctggcaggcagtgatgatgcagtcctccaggaacaggaggactgtgagccgctcctgggcgatcttcttgcacacaaggggctccagcaggggcacctcgtggatgcgcgggcacagcgcagtgcccagcaccttggcggggtccaggcggctgcggggaacagggccgctgggcttctccccaccactgccactgccgccactgccaccccggctgatgttgcccaggctgtggtagcgcttgtgctccttctctgccccccggtcccgccgctcctgcagtgtgagcgtggcgaagcggccaatgctgaatggtgtgccaggctctgccgccacacccgggccgcccgccttgcccccgccagctgggtgcgggagactgttggagcgggacagcgagcgaggcagggggcctgggccaggctcgccacccctcgagctgctggcggccggtggcgtggtgccaggtgtgccagggagggtgcgggtgcgggccaggggggggtgcgggtagagcacgtcttcagtgaggtcccacaggcagaactgcgtgtcctggcccgccgagccaaagcggtaagtaatggagccagccttgggcagtggagagagcggggcgcccccggccgagcctgtgcccgcagcctcgggctcctcctcctcctcttcgccgctccgctccccatcagcaccggctgctgtcgccgcctcctctgcccttgtggtgtaggggtcaaaggccacagcgttgacccaggacttgtggccatggcctcgagccaccacgcggccctcggtgaaggaccacacggtgaccaggtcatcttcgccacccgtcaccacgtagcggccgtcagggctccagcacacacacagcaggcccccaaagtagctcttcatgagcccacgcaggagcatggagtcgaagtggaagacgcgcaggcagccatcctggctcacacaggccaggtgccggccatcgggcgagaaggcgaactcgttgaggggcccctcacccaccgcccacttggccagcgggttgcggggtgccttgctcttggcagcatagacagagaagccctcgccctgcttcagcaggctgtactggggcggggccgaggcgcaggggtggctgacgttgtacaggtacaggtggccactggcgtgtgatgccaggaacaggctctccgactcaggcagccacttcagatatgtcaccttggtcttgtcgatcaaccgctgccaggggagacagtgtggggttgggagaaggcagtaaaacccaggcagaacttctccccgacccaaagtccccaagaaggccgttggacatggccccgctcacacagcaggtgccacaccaggcccaggtcctcctcggagagaagctcccaaactggggaagacagatggacaccaggtcatggaaacatggggaaacagaggctgctgcaaggtggccacagggtgctccaaggagcctcgatgtcccatctttggcgaggggacagtcctgcttgccacagaattgtcctgtatctcggggtcctcaacctccgggccatggaacagtagtggtccgtggcctgttaggaaccaggccatgcagcaggaggtgagtggtgggcgagcaggcattacagcctgagcccagcctcctaccggagcagcgcaccattcaatcctcgtaagagtgcgaaccccaccatgaactatgcatgcgagggatctaggtgtgcgctccttattagaatctaacacctgatgatcagaggcagaacggtttcatcccaaaaccatccccccaacagtctgtggaaaaactgtcttccataagaccagtccctggtgccaaaatggttggggaccactgtatctgtctaaccctcccccgatctttactacgtcaggcttcaagtaggaaatttcttcacggaaaggcagctccccaaaggaagcgatctttgtttggttcactattctttaaagcagtgcacacaggaggcagcttgaaggtaattcctggacaaatgagtgacaaccccccatcccgctaggtgcttagacaaaaaacctcggcatctgcccctcttttcctcatccaatccttccacaaatcctgtgggctcgaccttcaaaatacacccagaagtggctgggcgtggtggctcacgcctgtaatcccagcactttgggaggctgaggcaggcggatcacaaagtcaggagttccagaccagcctagccaatatggtgaaatacaagtagagatacaaaatctctactaaaaatacaaaaattagccaggcatggtggcgggcgcctatagtcccagctactcaggaggctgaggcagaattgcttgaacccgggaggcggaggttgcagtgaggggagatcatgccactgtactccagcctgggcgacagagcgagactccacctcaaaataaaaaaaaaagaaaaaatacacccagaatctgacctcctctcaccatcccattcaaccaccccaagcctgcaatgctgtgtgactggcctcaggctccaatgcctgggcctgtctgtcctctgcagccgccacagcgatgctctgtgaagtatcagccagcacctggcactgtcctgctctgaacacttcgcagcctctctcaagcagggttccagagcctgaggccctaatgctctcaggcagccagtgtatgcaactaaggagctgctctcccaggatgaggtgcctcccatccctgggagaactgaacaaataatcactctagtcacttctgccttccagggctcaggtgagccccaatgagaaaggctcctccacaggcttccaactaagagtaaggcaaaatctctccgtgaccttccagactctccatgagccagcccctccgttatttcttggaactcatctaccatcttctctccctcagtaactgcactggccacacggcttctgtgcaatcctgcatttgtcctagctggccccgatactcagaatgtccttcttggctgggtgtgatggctcacgcctataatcccagcgctttgggaggccaaagcaggagaatagcttgagcccaggagttcgagaccagcttgggcaacacaaagagaccccgcctctacaaaaaatacaaaagttagccagttgtggtggtgcatgcatgtagtcccagctactcaggaggctgatatgggaggactgcttgagcctgggaggcggaggttgcagtgaacgaagatcgtaccactgcactccagcatggacgacagagtgagaccctatctcaggaaaaaaaaaaaaaaaaatgcccttccccaggcaactcttctcacctgcctccttcaggtctttatttcagtatcacctcttagtgagggctttcctgaccaccctactaaactctccaagcttccctcagccccttccccactgcttcttctaaacaggccttaatcacctgctgacacacgaagacttaacttgattaactgtctgtctccccagctagactgaaagctccaaaagggcagggcctcctgtccagggccctgagatgtgatatccctagtgctgggaacggtgcctggcacagaacggatgctcaaaaactatttgtgaatggatgagctaatgaatttttaatccactgactgttccgttcactcccttcagccattcactcattctgagaatatttatggaacacctcctctggaccagagagaatgagacagaagccaagagcagtccctgcccgcggataaggtcgtttactggtatctcctcgtaggccaagttggcccaggactgagcaatctccatgtatgattctacaacagcggtcctgcaaggtaggaactggaatcccattttgcagaggaggagaagtgaggctcagagaatggtcaccttcccaaagtcacatgatgagtaaatggtgcagcagggctttgaatccaaagcctccagagcccagaactcaaagagcaagggcatcaactaagtcccgacttatttactagcctcaattctctaatctgcaaaatgggcagcacacttctgtatccactggttgatgaaaactcaaagaatggccgggcgcggtggctcatgcctgtaatcccagcacttcgggaggccgaggtgggcggatcacaaggtcaggtgtttgagaccagcctggccaacatggtgaaaccccatctctaccaaaaatacaaaaattggccgggtgtggtggctcacgcctttaattccagcactttgggaggccgaggcgggcagatcacgaggtcaggagatcgagactatcctgactaacacggtgaaatcccgtctctactaaaaatacaaaaaaattagctgggcgtggtgctgggcgcctgtagtcccagctgctggggaggctgagacagaagaatggcgtgaacccgggaggcagaggttgcagtgagccgagatcgcgccactgcactccagcctgggcgacagagcgagactccatctcaaaaaaaaaaattagccaggtatgatagtgcgcacctgtagtcccagctactcaggaggctgaggcaggagaattgcttgaacctgggaggcggaggttgcagtgacccgagattgtaccactgcactccagcctgggcgacagagtgagactccgccttaaaaagaaaaaaaaaattaaaaacaataaaaattacaattacaattaaaaaaaaaaaaaagaaccgggcatggtggctcacacctgtaatcccaccactttgggaggccgaggtgggcagatcacgaggtcaggagatcgagaccatcctgactaacacggtgaaaccccatctccactaaaactacaataaattaggcgggcgtggcagcaggtgcctgaagtcccagctactcaggaggctgaggcaggagaatggcatgaacccgggaggtggatcttgcagtgagcagagatcgcgccactgcactccagcctgggtgacagggtgagactccatctcaaaataaataaataaaagaaagaaagaaagaaagaaaacccaaggagtaaagtattcagcacaagggtaacacagcacagggcctgggtacagtaaaggcagctgtcattagctgctgtcaccccattctccatctctccctggtcctgcccctctcaggcctacactgttccgcaggcagctgcatcctaatggcatatagtgggtaggtgagaaggcagagaagttgggggctctgggggctgcaatcacctcctcattgaacagcttgctggtgtcctttttgatgagatccaggtactgcacttgacccgctgagaagcccaccagcagcgagatggtctcggtggcagcagtgaactggttgaaatcgtggcaggtgggctgggtgcccttgtagatccgcttgtcaattggcttgttgaggtcaatggacttgaggggtgggagaaaaggagttaatggtgtatgccactgaggagaaggaagaggatgttgaggttgggggaaaccactaagaggaagcagggttagaacccagagggaagtggggaggtgagtaggtggattgcgaaggacggggcaaccacagacgggaaggggacccaaatcacagacaagagtagcaaaaaagatggtaaggatcccccttgaccacagtgcctccccaaagttgggtcacctctaattcagagacacccttgtccacataatcagggttctgggtccacacagttcctaagctccgattccttttagcctcaccactccatcctataacctcagcaactcccttgggacctagtaccacactattccaagacccccaaaccttgaggtcacccaaatttccaggactctaaagcctaacatcctagcattctcttcactttgtagtccctaaaccgccacagttctgggacccgtcaaacctcacggtctcccacattttaggcccatttattacctaggggctccgaaggatccccatcatttctgggatcaccataaacggccagggttctcaccacatcgctttagagatgtcctgaatcacacctgcagattcccctgccagggcctctcattcccttgagagctcccatcagcttccggacgctcatctcctccaggaccctcatgacttccagaccccaattttctctagaatcccattcagcttctggatcccctatcaccttcaaggcccccatcacttctagacttctcctcattcctgggctcaatctcaagacccctctcccacacctccaggctgcaatactgggttctccatcacctctgggcttgcatcacctcatgattccccattacctgcagaatgcctgccaccccagaacccgggggatcccacctcatctcagataccccatcatgtccaatagtcaccatcccagaactcctacgcataacgggggtaaaggggatttcccccatcacctccaagatgcctgcccagcaccccgcgggcctctcatcacatttcagaatcctgtactccctccaatgctgtcgccctacaacgtccatcacatttagaatgcctatctcagggccccatatcaattcggggaccctcctatcagttctctggaacctccatcctttcagcacccagggccccacgatgcaggccgctcacccgttggctcccacgacgacagcagcctgggtagaaatagagctcacggcccaagttgaagcagacgcggtctccccccgagcccagccccgcgggcgtggcgggcggctccccggccccggcgctgtccggctccccgaggcgcacgaggctgaggcgcacggcgggcagggcgggcccgggtccggggcctgcgggcggcggggacgacgcggggcctgcagcgccgggaccggaggcggaggcagggccgggcgggggctgcggtggctgaggcggcaccggagtctgggcggaagccggacccgacctgcgagcggcgccgtcgcccgggagtagcttgtagaaaccctcgcgcgtgcggaattgcgacttaatctccgcgcagtcccccatggcggcgccggggcccgagccgccctccgcgccgcccgccgccatcttgggcgccccccgggccccgccactgccggactgccgcccgcagccgggccccctcccggaagccgctggcccgcgccggaaaaggtggggtcgtcgcccgggcaacgcctcttcgattggcacccagatccggaggcgggacgaatccccgcggtcgctcgggtaacggtgctgggactgtgggcggggcgagaaggtgggcgcggcctttgagcctgtgaccgacttgtggttggctgcgggggcggagcccgcaatggaaagaggcgtggccagttagaaagctcaagtccttagcaaccgcgccctgggaacgtttgcctagcaacggagggatttttttttttttttcccccacgacaaagaagccctcatccatagtccagccttcccatgaagtcacagccaaccccaagtgaccctggtctctccttagacgcccaatatacactcccctgacctccagtgtttcccactgacatattcaaatccctgaatgaccacagcatctgctaccattcttccccacccttggtgacccaccaaatccctgtgtccccacacaactcagaggacttcctctgacccactattgattaatgctaactccaaacatccttcatattttccaccaacctccaatgtatatttccatgattttcttattttcaacaacctcacttgtcctccaaaacctacctctgattcccaaattgtattgatccccacggtgccccagtgtcccagtgatccactcgtaacccaaagtctccccctgatcccaacagctcctactcatagccagtgctccccatgtctgctgaagccacccagccccatcatagatctttctagtctcatgtagtcaatggcctctacgatttctccctagagtgtcccaagggcatctcacacttaaaaaaaaaaatcctacaatggttcgggcatggtggctcatgcctggaatccgagaatcccagcactttgggaggctgaggtgggaggatcgtttgagcccaggagatcaagactgctatgaattcacatcactgcactaaagcctgggggacagagtcagactcagtctctctaaaaaaaaaaaaaaaagaaagaaaaaagaatcctacaatgaaattgacgtcttacaccaaatcctccacctctcttgcatccccaccttagggctagctctgccgtccactcagtcaaccaggccacagacctgggtgtcttcctagatgtgtaccatttatcttcactctgcccccgcttacagcctccaagtcttttgcattcgaccacgtggaattcctctttctcagttccttgttctccctgatccaagcttctcctctacccaagcccttcccccacccccacatcaaccgtgtctcttggtctcccagatttctgtctcacccccacttccacctttcacttggcatgtagagaggttttattttgtttttgtttttgttttttttgagacagtctcaccctgtcacccaggctggagtgcaatggctccatctcggctcagagacggggtttcaccatgttggccagtctggtctcgaactcctgacctcaggtgatccacccacctcggcctcccaaagtgctgggagtacaggcatgagccactgcacccggctttttttttttttttttttttttttgagacagagtctcgctcttgtcacgtgggctggagtgcaatgggacgattttggctcactgcaacctctgcctcctgggttcaagtgattctcctgccttagcctcctgagtggctgggattacaggcacctgccaccacacccagctacttttttgtagttttagtagagacggggtttcaccatgttgggcatgctggtctcaaactcctgacctcaggtgatccgccaaccttggcctccctaagtgctgggattacatgtgtgacccactgcactaggcctagagaggtctttctaaagcatgaatatgatcagggccctcccctgctcaaaacccatctgtagctccctagtgctctcaggggaaagttaagccccaagtgatctggcccctgccaacctcttttcaatctcatatctcaccactaactcctcacactatccaccacctaaaatgaggcttgaaaaactaccccaacatatcacactctctcttgtccttgggtctttgcacattctgttccctattcttggaatgcctttccccattcttttcttgaccctttaagagttggctcgggagctctgtcagtcctctgggcttccccatttgggctgtcactgtctggaaatgagtctctctccctatagtgttgtgaggtccaggaaggcaggactgcagctgtctgtgtccccagcacaggggtgggctgacaggaggtatttcaataatggtttgatggctaggtaaatgaataaataaaacaggtggggctggtcgcggtggctcacagctgtatcctaacactttgggaggccaagacaggcagatcgcttgatgccaggagttcaagaccagcttgggcaacataaaccccatctcatagtgagactctgaaaaattgaaaaaatttagctgggcatggtgggctgtgcctgcagtcctagttactcaggaccctgtctctacaaaaaatacaaaaattagtgtatgtggtgatgtgcacctgcggtctcagctactccggaggctgagatgggaggactgcttgagcccaggaggtcaaggctgcagggagctgagattgtgccactgtactctaacctgggtgacagaatgagaccctgtctcaaacaacaacaacaaaaaccaaacaggtgggagagactctgccaggcaatgtctgtgctctctgcagggcccaacagccctggcttggagtccatgtcaacagaggtggtgaacaaatgaatgaatggctcatccataatgccgtggaggaattttatttgaagcagttgccttccttttctatccctgccctctggggacaggaagcacatagtgaaaatataatccatgctaactacctctaaggggaaatttgctatctacctgcttggggaaagtggctagagggtgggcctcagtcatctgtctcctcgccctcctcctcctcctcgccctcctcctcctcctctgtggctcccagggcttgttcctgggctgctttcagagcctgctcctcttccactgtggggtcactcatctccatgatctctgggccactggggtactcttgttgaatgggggctggcagggccgggttgaagctctcggggctgtacttgtgaccccagccgatgtagatgttctcaaactttctggagaagcagtgagacactgtgaaattctccctcaaaggccccagacttgacttttttttttttttttttgagatggagtcttactctgttgcctagtgcagtggtgtgatctcgacttactgcaacctctgcctcccaggttcaagcgattctcctgcctcagcctcccatgtagctgggactacaggcacgcgtcactacgcccagctaatttttgtatttttggtagagatggggtttcaccatgttggccagtgtggtctggaactcctgacctcatgatctgcccgcctcggcctcccaaagtgctgggattacagacgtgagccaccgcacctggccagccttgactttctttaagggtaggacccagcatgtgcatagcatgactgcaaagttgtggatggcagggtgaaatgtgctcactgggttcctctgtattacccaggctggatgcaaactccacctcctgggttcactgcaaaatctgcctcctgggttcaagtgattctcccacctcagcttcccaagtagctgggactacaggcacacaccacctcgcccagctaatttttatatttttagtagagacggggtttcaccatgttagccaggctggtctcaaactcctgacctcaagtgatctgcctgcctcagcctcccaaagtgctgggatcacaggcatgagccaccatgcctggcctaatttttgtatttttagtagagagggggtttcatcatgttggccaggctggtcttgaactcctgacatcaagtgatctgccgcctccacctcccaaagtttaaaaattagccagttgcagtagcacgtacctgtggttccagctactggggaggctgaggggggaggattgccggagcccaggagtttgaggctgcagtaagttgtgatcatgccactgcactccagcctgagtgacagagtgagaacgtatctcaaaataaatcaagaaataagtaactaggctggacgcagtggctcacgcctgcaatcccagcactttgggaggccgaggcgggcggatcacaaggtcaggagatcgagaccagcctagctaacacggtgaaaccccgtctctactaaaaatacaaaaacaaaatcagtggggcgtggtggcaggcgcctgtagtcccagctgctggggaggctgaggcaggagaatggcgtgaaccctgggaggcggagcttgcagtgagccaagatcgcgccactgcactccagcctgggtgacagagtgagactctgtctcaaaaaaaaaaaaaagaaataagtaactaaaaataacaaaaaaaattaaattatatatgtggctcatattttatttatgtgagacataattttatgttggatatcaatttatttatattgtgacactttatttatgtccaacatatcatgtgggacataaataaaattgtctaggtgctggggacacagcagtaaacaaactagacaaaactccctgccaggtgcggtggttcaggcctgtaatcccagcactttaggaggccgaggtaggaggatcaactgaggtcaggggctcgagaccaccctggtgaaaccacatctctacaaaaaatacaaaaattagctgggcgtggtagtgggcgcctgtagtcccagctactcaggaggctggggcataagaatcacttgaacccaagaggtgaaggttgcagtgagctgagatcacaccactgtactccagcctgggcgacacagcgagactccatttcaaaaaataaaaaaaaaatccctgggttgtgcctacattctgctaagaggagactgataatgaacaaggaggtaagtgcccaggcataacccagcgaattcagcctttctgcagaattttaactagagaaggaagaggaatagatgggaggaaagggaggggactaagaggtagggagagagggagacagagactgataaagaggcagagagagccaagcatggtggcccacgcctgtaatccctgcactttgagaggctgaggtgggtggatcacctggtcaggagttcgagaccagcctggccaacatggtgaaaccccatctctactaaaaatacaaaaattagctgggcacggtagtgcatgcctgtaatcccagctactaggggggctgaggcaggaggacggcttgaacctgggaggcggaggatgcagtgagttgagatcgcaccactaaactccagcctaggcaacaaaataagactccatctcaaaaaaaaagaaaaaagaaaaaatttaaaaatgaggccaggcacagtggctcacgtctgtaatcctagtatgttgggaggctgaggtgggaggattgcttgaggccaggaggtggaggctgcagtgaaccgtgatcacgccactgcactccagcctgggtgacagagagagaccctatctcaaaaaaaaaaaaaaaaaggccaggcgcggtggctcacgcctgtaatcccagccctttgggaggccgaggtgggcggatcatgaggtcaggagattgagaccatcctggctaacacggtgaaaccccgtctttactaaaaatacaaaaaaattagctgggcatggtggcgagcacctgtagtcccagctacttgggaagctgaggcaggagaatggcatgaacccgggaggcggaggttgcagtgagccgagatcgcgccactgcactccagcctgggcaacagagcgagactctatctcaaaaaaaaaaaaaagaaagaaaagaaaaacaaaaacaatggaacaatgggtggacacagattgggtgggggacagaagagcgttgggtgggtgggggcagaggatggatggacaagtggagcctcaagtttgtatcatttgctttcagaggaatgttggcatatcagggtatagcctgaagaagggagttggcaaaagcaaacgtgcctcttcccagcttccagagaaggaaaaaataaatgccaggaatgtgttaaagtatccagattacatgcaatcccaccacggctgtgattcatacaggagcgaatacagtcccagttcacattgagattaaaaacgaaattctaggaaaaatcatcatgccatctggtggacaaagctggtaggtgcgcccacctccagcggcaaaccccctgtcacgcagcagggcagagggctgccaggtgcctgcgggggaaggctgaaggactgtggggagtgtgtagctgggtgggaggatgtaggagtgactttggcttgccattcttgtttgttttttgagacaaggtcttgctctgttgcccagactggagtgcagtggtgcaatcacagctcactgcaacctcgatctcctgggctcaagcaatccttctgcctcagccccctaagtagctgggactctgtagtccgtgccatcatgccgggctgattttaaaaatttttttaatttttttttttgtacagatagtgtcttactgtgttcctctcgctggtctcaagctcctgggctcaagcaatcctcccaccttggcaacccagagtgctgggattacaggcatgagccagtgcacctggcccaagcttgccattctttttggaacaactggtggtgggagggaaggtttctgccccatagagagaaaagccttccaactggaagaacaggccgggtgcggtggctcatgcctgtaatcctagcactttgggaggccaaggcgggcagatcactcgaggtcaggagtctgagaccagcctggccaacatggtgaaatcttgtctccactaaaaatacaaaaattagccaggcatggtggcatgcatctgtagtcccagctactagggaggctgagggaggagaatcacttgaacctgggaggcggaagtttcagtgagctgagatcgcactactgcactgttgcccagcctgggtgacagagcgagactccatctcaaacaaaacaaaacaaaaccacaaacaagaagaactgtccaggggaccccagggacggagttagctcctccagagagggattctgctgctgtcatcagggggctggagatccaggttcgtatcctgcaagtgctgtgtgaccatagccagtccctcccactctcttattctccttgctctcatcatgactcatcaccaagacccatcctagtgggctggtatttcccactttagccctggtgaaactcctaggagctatgagggcattagtccttggggcttcctgaagggggccctccccatctctgcccaccctggcgagttgcccagcccaaccaggcttgaagaagtcctgagagattctcctgctgggaggggctgggggaagacctacttgccactggcataggcataggccccgggccagaggttggagcgcacaacggccactgagtactgcgggcagaggctgcaggacaggcgggtggtccagggtgccaggtgcatgatttctgtggtggagaggcagcagaggggggcagcagggtcagggaggcccccaggccctgcactgcaccctgaaggaaggaaggcagcagtgagggaggcctggaggggcatgaggggaactatagccaccaacagctcgggctgcggtgtttgaaccctcgctgcagaccacacacacacacacacacacacacacacacacacacacacacactctctctctctctctcgctctcttttttttttttttggagacagagtctcgtcgctttgtcactcaggctgcagtgcagtggtgtgagctcgactcactgcaacctctgcctcccaggttcaaacgactctccttcctcaacctcccgagtagctgggattacaggcatgcaccaccacgcccggctaatttttgtatttttagtagagacagggtttcaccatgttggccaagctggtctcgaactcctgacctcaggtgatccacccgcctcagccccccaaagtgctgggattacaggcgtgagccacctcgcctggcctggaccactctttctctatgtggccccaggaagccagttcacctgtctgagcctcagtggctgcacccaggaaatggggagactcatctggcctttgttgcagggtggcagtgaagcctggtgacaaggtctgcagcacacctgctgcagtgcctggcgcccagcagggcctccagactgggaagccactgtgattccactcccgagttggtcatcggtttggaccagggtgcagagggaagggcacaggctggcaggatctggcttcaaatccaggacctgtcccctggcccactcctagcctctctctccacttccctccgggtgcctgaggccccaaccttaaaaaattcctgtccattcatccaaaatccagctccaggttgggcacagtggctcctgcctgtaatcccagcactttgggaggccgagtaaggtggatcacttgaggccaggagttcgagatcagcctggccaacatggtgaaaccccatctccactaaaaatacaaaagttatctgggcgtggtggcacacgcctgcaatccagctactcaggaggctgagacgggagaattgcaggaacccgagaggttgaggttgcagtgagccaagattgcaccactacaccctagcctgggtgacagagctggactccatctcaaaacaacaacaatgacaacaacaccaccaccaccacacacacacacacacacatacacacacatgcacacacacacccagctccagtctttaggcagggttccccaactacatccccttccctccaggcccaaactcaaaaggccatatcctaaggtttaggccattgccacgtgtctatggacatgttcccagaacctcctgatggggccactgtgattacacccattttttagctgagagagcctctgagcctgggagggaaggaccggggagatggaccccagcagtccagccacccctccctttcttcccagccctccccagccagtggtgtacaggctgagagggcttccttacctgcatcttctgaaagtggcgttagcagtggggggccaacctcctgctccacctcctctggcccctcatctgccttctcttcctcctcccccaggtcctcctcctcctctgtcttctgcaaagggttcacccaagtgcagcggccctgggggtggggggaagctcaggtgatggccccagtgcacggaacccagcctgcctcctgtgggggaggtgaagggccaacaggcatagccttgtcctcagagacccaggcacaggcaagagggcaagatttagccgcacagctaaggggaggtgggaaacgggctgacagaactgctgtgttgaggtgaggactcctgactgtgcgacccccattcatgcattcattcactcattgaatttttttttttttttttttttgagatggagttttactctgtggcccaggctggagtgcagtggcacaatcttggctcactgcaacctctgcctcccggtttaagtgattctcctgcgtcagcctcctgagtagctgggattacaggtgcctgacaccacgcctggctaatttttgtattttttagtagagacggggtttcaccaagttggccaggctggtctcgaactcctgacctcaaatgatccacccgccttggcctcccaaagtgctgggattacaggtgcgagccattgcacctggcccactcattgattcttttcttttttttttttgagatggagtctggctctgtcgcccaggctgaagtgcagtggctcactgaaagctccgcctcctgggttcacgccattctcctacctcagcctcccaagcagtggcttacgcctgtaatcccagcactttgggaggctgaggcgggcggatcacgaggtcaggagatagagaccatcctggctaacacggtgaaaccccatctctactaaaactacaaaaaaaatagccgggcatggtggcgggcgcctgtagtcccagctactcaggaggctgaggcaggagaatggcgtgaacctaggaggcagagcttgcagtgagccgagatcacgccactgcactccagcctgggcaatagagcgagactccgtctcagaaaaaaaaaaaaaaaaagccaggcatagttgtggtggtatgtgcctgtagtcctaactactcgggaggctaaggtgggaggattgcttgagccctggaggtcagggtagcagtgagttatgatctcatcactgcacgccagcctgggcaacaaagcaagttgctatgtcttaaaagaaaaaaaaagctgggcatggtggctcatgcctgtaatcccagcactttgagaggctgaggcgggcagatcacctgaggtcaggagtttgagaccagcctgaccaacatgaagaaaccctgtctctcctaaaagtacaaaattagttgggcgtgatggcacatgcctgtaatcccagctacttgggaggctgaggtgggagaattcgcttgaactagggaggcggaggttgcggtgagccgagatcacgccattgtactccagcctgggcaacaagagcgaaattctgtctcaaaaagaaaagaaaagaaaaaaaaaaaaaaccagccagggcgcagtggctcatgtctataatcctagcactttgggaggccaaggtaggcagattgtctgagctcaggactttgagaccagcttgggcaacacagtgaaacctcatctctactaaaatacaaaaaattagccaggtgtggcagcgtgtgcctgtaatcccagctactcaggaggctgaggcgggacaatcgcttgaacccaggaggtggaggttgcagtgagccgagatcgtaccactgcactccatcctgggtgacaagagcgagactctgtctcaaaaaaaaaaaaagaaaagaaaagaaaagaaaaagaaaaaaaagaagaaagaaagaaaagaaaaaaaaatgcctctgtccccaaaggtttctgatgggattatccgctaatatctgttgaaccaatgaatggatggatgaatgaacgaatgaatattagttgcccagcagagagtaagagcttgatgtcagtattgcagggtcatgcgtgagccccctgctcctgccgtttgtgagaggcgggagtcccggcgctcacctgcggcaggatgtgctgtgtgtgatgcacccagttggccatggagtcgaccagctccagcacggggatgccctcgaagtccgggttctcctcgtaggagtcgcgcccagcaccaccttcctcctcctcgtcgccctcctcctcactaaactggtagaagcccagcgggctgacctgcgtggcggccgagatgcgggctatctgggcccgcaggtagttggcctcgttgcccgggaagggtgggtagctgacgactggcgtgtccaggtagcctgtgaagaacttcttgatctttcgggcgttcacgatctgggctggagtgacgtggggcagccgcgtccatggcaggcccggctcgttgcacacaaagtacaggtacttgttggcgcctgagcggctctcctccttggggatcacgggcggcggcttccatacggacttagggacgatgtccacggccttctcctcgtcctcctcgccctcctcctcgccgtgcgcctccatgacctcgccaccttccgtcatctcctccacctcctcctcctctgcctcctcctcgccctcccggaattccacctcggccaccaggtagctgcgtttgattcccaggatcttgccccagaagcgacaggtgtggatgggctgctgctccaccagctgtttcatggccaggaaaatgcggaagctctcgtccgagctcaggccgacgccggcctgctcgaagtagaaggcagtctccatgatgttgggcactggtgtctccccctgcgcagggtagggtggagggcagaggggagaatgctgaagctctgctccctagcctacctcttccagactcttctagagtcaagagagctaaaagaggccgggtgcagtggctcacgcctgtaatcccagcactttgaaaggccgaggctggctgatcacttgaggtcaataattcgagtccagcctggccaacatggtgaaactctgtctctactaaaaatacaaaaattagccagccataaaagcaggtgcctgtaataccagctacccaggagactgaggcaggagaatcacttgaaccggggaggcggaggttgcagtgagctgagattgctccacgcactccagcctgagcaacaaagtgagacacggtctcaaaaaataaaaagaggcctgatgtggtggctcacgcctgaaatcccagcacttagggaggccaaggcaagcagatcacctgaggtcaagagtttgagaccagcctggccaacatggtgaaaccccgtctctacaaaaaatacaaaaattaggcaggcgtgatggcaggcacctgtaatcctagctatttgggaggctgaggcaggaggatcgcttggacctgagaggcggaggttgcagtaagccaagatcacaccactgcactccagcctgggtgatagagtgagactcccactcaaaaaaaaagagaaagaaagaaagaaagaaacctaaaagattctgtaactcagctgctcaggccacttgtgctggccagtgagatgtagggaaagcccttggacaggatgtccctgatggagaagaaaagggaaaaccacactaggagaaaatttttcttgccttttgtcattccctattcttcctgcctggaatggggatataagatctggagccacagcagctatcttgggaccatgaggcaacacatgggagacaaagtactacacccttaatggtggtggagatgaaaggtggaaattgcctggtccccagtagcattgctcagctgccttacccaccctgaccttcttgctcctgtaacaaagaagccacttttattcatgatttctgtgacttgaggcccaatgcactcctaacacatactccatgtttcacagaaagttaagggagaagacaggtctcgaacggaggagtcagtgatgttagaggatggtaataagtcctgtcttcactgcctccatctataccgtgtgcttgattcacacagccagaggatgggtggggtggaggagaagaaagaaggagaggaggaggaggaaaaagaggaagaaggaaagaaagagaaagacagaaagacagaggctcagaaagggactgaaggcaagcaggctgaaactagaagccagcaaagtttatggctgggcgcagtgattcacgcctgtaatcccagcactttgggaggccaaggcagggaaatcacaaggtcaggagatcgagaccatcctggccaacatggtgaaatctggtctctactaaaaatacaaaaattagctgggtgtggtggtgggcgcctgtagtcccagctactcggaaggctgaggcaggagaatggcatgaacctgggaggtggagcttgcagtgagtggagattgcaccactgcactccagcctgggtgacagagtgagactctgtctcaaaaaaaaaaaaaaaaaaaaaaaaaaaaaaaaaaaaaaggaggccggccaagttttggctcagaagccagagaaagaagaagtgtaatgtacatctgcacgggccacacaccaatgctcttccttctcccagggaaatgcctgccagcccctatccatgtggccacaaggctgtccccaacactttattattcaaccagtcccaaaatctttattatttatttatttattatcattatttttgagacagagtcttgctctgtcacccaggctggagtgcagtgatctgatctcagctcactgcaacctccactcctgggttcaagccattctcctgcctcagcctccccagtagctgggattataggcgtgcaccaccacacccagctaatttttgtatttttagtagagatggggtttcaccatgttggccaggctggtctcgaactcctgacctcgtgatccgcccgtcttggcctcccaaaatgctgggattacaggcctgagccactgtgcctggcatattattattattttttaaaaattattattattattatttttgatacagagtcttgctctgtcgcccaggctggagtgcagtggcgcaatctcaactcactgcaagctccgcctcccgggttcacgccattctcctgcctcagcctcccaagtagctgggactacaggcgcccaccaccatgcccggctaattttttgtattttaagtggagacagggtttcaccatgttagccaggatggtcttgatctcctgatcttgtgatccacccaccttggcctcccaaagtgctgggattacaagcgtgagccactgcgcccggcccattactattttttgagacggagtctcgctctgttgcccaggctggagtgcagtggcacaatctcggctcactgcaacctctgcctccaggattcaagcgattcttctgcctcagcctcctgagtagtcgggactacaggtgcacaccaccacgccaggctaatttttgtatttttagtagagacagggtttcaccatgttggccatgctggtctcgaactcctgacctcaggtgatctgcccgctttggcctcccaaagtgctgacataacaggcgtgagccactgcacccaaccagtgatgggatttataaccaagatactgtgatgctgaaaacagctctctttgtttagggacagctagggagcctgggagtgtggggaataggcagctctcagtgcccttcactgcagagccaccttgcaagactaggaccttaccagtcctagactacacctgacgattctgtgtgagaaaaatgaccaactcatccaagtcacttatttctatttatctgacatcatctatatcctaacttaaagggacctatgttgtcaaacaagtaaaataaggtgttagtttttggaatgtgccaaaataatcctaaagttagtctaaaattatagatgtgggcgggcgccatggctcacgcctgtaatcccagcactttgggaggccgaggcggacagatcacctgaggtcaagtgttcgagactagcctggtcaacgtggcaaaatcctgtctctactaaaaatacaacaaattagccaggcgtggtggcacagcctgtagtcccagctactcgggaggctgaggcaggagaatagcttgaaccctggaggcagaggttgcagtgagctgagatcgtgccactgcactccagcctgggcgacagagcaagactccgtctcaaaaacaagaacaaaaattagccaggcatggtggcgggcacctgtaatcccagctactcgggaggctgaggcaggagaatcacttgaacctgggaggtggaggttgcagtgagctgagttcacaccactgtattccagcctgcgtgacagaatgagactccatctcaaaaaaaatggaaaaaataaaataataaaataaaattatagatgtgagaatagtcaaaacttatctttttttttttttttttttttttagacagactctcactatgttgcccaggctggagtacagaggctcaatctcagcccactgcaagctccgcctcctgggtccatgccattctcccgcctcagcctcctgagtagctgggactacaggtgaccgccaccacgcctggctaattttgtttttgtatttttagtagagacggggtttcaccgtgttagccaggatggtctcgatctcctgacctcaggtgatccacctgcctcggcctcccaaagtgctgggattataggcgtgagccatcaagcccggccgagaatagtcaaaacttttcttttttttgttttttgcttttttttttttttttgagacggagtctcgctcttttgcccaggccagagtgcagtggtgcaatctcagctcactgcaagctccgcccaccaggttcacgccattctcctgcctcagcctccccagtagctgggactacaggcgcctgcctccacgcctggctaattttttgtatttttacaagagatggggtttcactgtgttaaccaggatggtctcgatctcctgacctcgtgatccacccgcctcggcctcccaaagtgctaggattacaggtgtgagccactgcgcctggccttttttttttttttttttttttgagatggagtctcgctctgtcgcccaggctggagtgtagtggtgcgacctcccctcactgcaatgtccacctcccagtttcacgccattctcctgcctcagcctccctagtagctgggactacaggtgcccgccaccatgcccggctaattttttgtattcttagtagagacagggtttcacttagccaggatggtcttgatctcctgacctcgtgaaccacccgcctcagcctcccaaagtgctgggattacaggcgtgagccaccgtgcccggctagtcaaaacttttcaaaacagaggttcagtgatggggagaattatgctaccaaaacagcaacacctgccgtgcagctgctgtcagcagtaaacaggagagtcctagagcaggaagccatccacagagcaaaggccgggagcagagactcctgcaggaccctgtgtggggagcagatggtgcaggtggcatttcaaagcagtgggggggcaggaaggaatggtttattgcataaatgccattcaaggtcctggctagccgtctggaagacagaaaacgagagaaataagagccttgccttgacagaaaaagaaacacaaaatgctgaatcatgcattttttatgagtcatttcctagaagcatgtacaggccacaaaagcccccagttttgcccttccacagaccccacattaagaactccagctcttggctgggagtggtggctcacgcctgtaatcctaatactttgggaggccgaggcaggaggatggcttgaggccaagagttcaagaccaacccggccaacatagcaagacccccatctcaattatttttatttatttatttatttttatttatttatttttttgagacagagtctcgctctgttgcccaggctggagtgcagtggtgtgatctcggctcactgccaagctccgcctcctgggttcatgccattctcctgcctcagcctccggagtagctgggactgcatgtgcctgctgccacgcttggctaatttcttatatttttagtagagacggggtttcatcatgttagcaaagatggtcttgatctcctgacctcgtgatctgcccacctcggcctcccaaagtgctgaggttacagatgtaagccaccccatcctgccaagactgaagttgttttgtgactggattgtgcaatgctgtctttcgcctccaggccttggcacaggctgtgccctaagtatgcttgggcccccactgaccctgatgcccacctctcctgactggctcactcaccacctcctcctccatctcctgttcgccttcagtgccgcctccactccgggtgaacagcgccttctgtttctccgccatcttgtaggtgggctgcatctcggggtcgtcccgcagcgtgtccagcttggggtggaaccactcccactgcgtggtgcggttcagagactccaggacagacaaggggtcctcaggccgctggttcaggatcttggtcagcagattcaccaggtgctcgtacctgcctcccgcaggaggagtgggaggagagggacctcactcactcagctcactgagctggctcccatgtgcctggccctgtgcctggtgctggggacacagtagggaactgaaaaggtccctgcccaggtgtagctgacatttatttatttatttttatttatttagtttttgagatggagtcttgctctgttgctcaggctggaatgcagtggttcatctcggctcactgcaacctctgcctcccgggttcaaataattctcctgcctcagcctcccgagtagctgggattataggcgcccgccaccacgcctggttactttttggatttttagtagagacagggtttcaccatgttggtcaggctggtctcgaactcctgacctcgtgatctgcccgcctcagcctcccaaagtgctgggattacaggcgtgagccaccgcgccttgccgacattcttatggtggaaacagacactaatcaaacgagcaaaatatatacagtgtgtcaggcatggggtggtaatttttagggtgacacatatagtactgaatggggcctgggggtgccagggatgggagaaggtttgcaattttatttttttaatttatttttcagaggaggtctcgctgtgttgcccaggctggagtgcagtggcacgacctcagctcgctgcagtctctgtctcctgggttcaagcgattttcctgcctcagcctcccaagtagctgggattacaggcatgcaccaccatgtcccgctaatttttttgtattttttgtagagggtttcgccatggtggccaggctggtctcaaactcctgacctcaggtgatccaccttcttccgcctcccaaagtgttgggattacaggcgtgagccaccgcacctggccaacatttgtattattattattattattattattattattattattattattattagagacagagttttgctttgttgcccaggctggagtgcagtggtgtgatttcggctcaccacaacctctgcctcctgggttcctgggttcaagtgattctcctgcctcggcctcctgagtagctgggactacaggtgcacaccaccatccccggctaatttttgtatttttagtagagacggggtttcactatgttggccaggctggtctcgaactcctgacctcaggtgatccgcccgtcttggcctcctaaagtgctgggttaacaggtgtgaaccaccgtgcctggccaacatttgtattttttgtattttttttttgagacagggtctcactttgtcactcaggctggagtgcagtggctcggtcttggctcactgcaacctctggttcccgggttcaagtgattctcccacctcagactccccagagctgggattacacgtgtgccaacatgcctggctaatttttgtactttttgtagagatggggttttgccatgttgcccaggctggtctcaaactcctggactcaagtgatctgcctgcctcagcctccccaactgctgggattacaggcgtgagccaccaggcccggccacagtcagcctttgaaaccaagttggtctgatttccaagcatgtatgtgtcaccttttgctttgcggaagctgttttgttggcagtcttgggtgtggtgttgggccatcatggaagttgggaagggtaagaagaggtgagactttggctagggcttctcaggaagagagcctgaagctctgaagagctggcacttggggaatagccagaggttaattctgactagattctaggatccgaggaaggagcaggtagtgactagaaatcaagtttggtcagcggccaggggctgaaccacgtaaggccttttgtttgttggtttgtttgagacagagtctcgctctgttgctcaggctggagtgcactggcacgatcttggctcactgcagcctctgcctcccggttcaagtgattctcctgcctcagcctcccgagtagctgagatcacaggcgtgtgccaccacgcctggctaactttttgtatttttagtagagacagggttttgccatgttggccaggctggtcttgaactcctgacttcgagttatctgtctgcctcagcctcccaaagtgctgggatcacaggcatgagcaaggccttatatgtctcaggccaggagccttgaaggttgtggtgaggagtctgagcttccccctgtgggcaatggggagccatagcaggttctgagcattggagggacacggccagctttgtgctttaataagaaccattacttcatcaacctcatttctcccgctctccctcttcctcccttggttccagacacaccagcccctccttactgctcctcaaaaacagcaagcctcagagcctttgcatttgcagtgtgctctgcctggctcactcttcctccggtcatctgcaagatgctctccctcgactccttcagggccctaatcaaatgtcacctccttggacaggccttcactgacccacacaatttatttttttgagatggagtctcgctctgttgcccaggctggagtgcagtggcacgatctcggctcactgcaacctctgccgcccgggttcaagtgattctcctgcctcaacctcccgaggagctgggattacaggcccatgctaccatgccctgataatttttgtattttttagtagagacagggtttcgccatgttggcaaggctggtctcgaactcctgacctcaggtgatccgcccgtcttggcctcctcaagtgctgggataacaggcgtgagccaccgcacctggttggacccccactatttcatgtgttccctagccctcttagcctcccttatttttcacctgagtccttagcttcagtttatcactttttctgtttcttgtccactctcctagaatgagagcatcctgggtatctaatggaggctgagagcagtgttttgtgactgtagctaagtggctttggcaagtatcttcctcaggcagggaggtttagttgcaggataagagggtctcaggagggctgggcacggtggttcatgcctgcaatcctagcactttgggaggctgagatgggcggatcacttgaggtcgagtttgagactagcctgggcaacatggtgaaatcttgcctctactaaaaatacaaaaattagctgggtgaagtggagcgcgcctgtaaccccaactactcgggaggctgaagcagaagaatcacttgaacttgggaaggagaggttgccctaagccaagaccacgccactgtgctccagcctgggtgacagggtgagactatgtctgggggaaaaaaaaagcaagagggcttggggagccaaatcacgtgttctggaatcctgactctgccatatcctagctgtgtagttttgggtaagcgacccaacttctctgtgtctcggtctcctcctctgtaaagtaggatgagctgatgtgctcatctccggtgagaattaggtgagtgtgtgcagtgccagcacatgtctgggaagtgaatgctagctgttgttggcattgattccgactcagctgaattagagtcactggttttccatgagggatgatcccttgtctgactgactgaggcaggcacttcgggtggggcccctccctgcctgggtcccccacccgccccactcctagcccctgctcacaggctgaggtcgcaattgatgctggtctgcagcaggtaggccttggcgttctgcacggccagctccagaggctcgggctcaggcacctgggcactgtagtgtgggaagcccagctcagagggcaagaactgaagggcagggtcatcccttatgtaaggcccgtgctgggcaccttcagagaactggtctgtctggtagaggttgaactggcccaaggggttgactgggggctcctggaaggtggggtccagttgctggaacaggctgctttggccctgctggagccgctgcagcattaggctggtggtgagctcggcgacctgcatcctgctttcatcagagtaaggctgaggctggaactctgagggaaagcccgtgttcacagatgggtactccatgccacccagccgggcttcctcagcctggaagacctggggcatcagcaagttctcctgttgggacaggctgcccctctgtgaccaaccaggggcgtttcgctgggcgtctggaggtatctgctgcctctcctcggggtccgctgccagggcctgagcttggtcccgactgtgccgcctctgggaggcctgagaagtcctccggcccggaggctgctgggcagggcgctcagggtagggcggcaggtctcccatggttcgccaggaggcacagatctctaggagaaaggcttgcagacaaggaggccaagcgagagccacctgtcgacaccgccggtttctgagcaccgagagagggggccgttacccgtggagggcgcggggagcgggccagggtgggttccgcgcaggctctgggcgcgcactcccgatcccgcgcagccccacggtggacgtcgcgccagactcgagacggcacccgcgccccaggcccgccatccctttttttttttcttttcagtaacttgcccaagttcacatcttttatttctttttaaggcaaagcacccgcaggtcaagccccgccccgtcccccagccccgagtccctgtcccaccccctttccccctcgagccccgtcagctgttccccttggcctcgggttccctggcgtcctcggcagccgggctgggagtcttcatagcatcttctccaacaggtgcgagggtctgggggctccgctcctccttcaaggtcagcccgcccgctgccgtctcctggtgaccggggaaggaaagggcagccgggtggagggcgcggtcacctccacgctccccttcaggccctgccccctgatggcccctcctcccccaccttcaccccggcccagatccggcttcttccttcgcagcggaggctgctctccctaccttgggtagggggccctcgagactagagtccaacagcgcggcctcggtcagccccgagtcgtcatccatgctgatgaagatgcccggggtctcgcactcaggcccctcctcccggaaatccatggcttcctcagacgggggcgggcctggccgggccgacggagagggagagggggaggaagaggagggggctcccactcctcccggcttcagcttctgttcctcctccagctgccgctttaaggccttctcctgggccagtcgcaggccgatgaggtcctgagggggccggggtgctggggccggggccaaggtcaggggctccagatcatcctggggatagggagggccacacagaagctcagaggtgggtggctcagaggacggccggaaagagaaggaaccaccctgaggtggtctttgagttcttcaccaagagcatggggaggaaggggcagttgtcccccagacccccaactcccagcaggagcatcccctgggagacgggtggcccagaggcaggggtggcctgagtctctcggggtcaggaggaggccatggtgagccttgctggcttggggtagggggtgggagtctggggatccagatgggtgggctgcagggccctcacctcctccaagggccccgcaggcgcctccttggcctctggctcctgcttgccgctggcctccaagatggtcatgatggagttagggatgtgagcttgctgggtggagagcaggaagggggcgctgggggcagctctggcacagagaccccatttgcacacctcaggtccgggggccctaaccctccagaactcccagcagtgcagggccttcttgtgtccgcctccatccagtccccaccaaccagagggacccagggggccgcccaccgcacaccctgggtggggggaaagggtacctggtggggggaaggggtacctggtggggggtgaaggagcggacatgggccagcaggggctcccggagctctgggcacttgtcaaagacggctcccagctgctggggcggcagctgcaggatgacctggaagctctggggctttgtgcgctggcagcacttgatgaagccctcccacaccttggggtacttccacacctgaaccagggagggagggagccgtcgggagaggcacacaggcatccccccgagccttgacactgggagaaagaccttgccaagaccatgcccaaatcccaccatccaagattcctctggatgggcaacaagcagccccgacctccctccagaggcctttgtcttcccgatccaggcggctggaccacgagggcaacttgggaagggggtggaagaaaactcagccgccttttaccagagctccccctgggccaggcccaggctaagtgctgcgggagcacctctcatgacattctcacggcagcctccagggggcgaaattacccctgctaaacagcggaggtccgtgccggtgccgggacctgtcctgggtcacatgtacattctcaccgcagcctccagggggcgacattagtcctgcggggtttggtttttttgttctcttttttttttttttttttttttttttttgagagatggtcttactctgccgcccaggctagagtgcagtgagtggcgcgtttcttcctcactgcagccccaaactcctgggctcaagcagtcctcctgtctcggcctcccaaagagttggcattacaggtgtgaaccatcacacctggccttatcgtggtatttctaaagcccaaatttctagcacctcttaaaaaactgggccatttttcagctctgggatgcatcctggccgggcacacagcggtggagggtgaggagcagccatgcctctcccgggtgcacaccccttgagggttaccacagctcctaccacccagctgccctccctcatcacctgggagctggcccagtcatacaccctggagcactgctattttcttggcaggaggcagagcagagcctgctgtcctccaccgggctccctccggggtcagacgggggaaggggagggcaagcaggctagaagctgctgtctgcagcctggaggcggggtggccggggatgggttacctgcttcatgatgaggcgggacaggatgttcatgacgaagccccccaggcgggggtacatggtcagggactggatgacggtcctcatgagcagcatgggcagggggctctgctccatcagctgctgcatcaccacggccagcacctctgacgtgtacacgttccgctccgcaaagcacaggttggtggctgcgaggaggcggagagtgggcctgtcctctctgcccagctgccccctgggaggtgggagtcccggcctctgctgtctgcccatgtgaggggaagacttctaaagccctgacttctaaagcccctgcgggagagaggagactcccccgacccagcagaaggcacactgcaagccccgcccttggaaaacctgcaggcttggttcaagggagaagacatccaactccaggaagccccaaaatgggtggaacagggaacccgtggcccctcactttaaggacgaccttgggaaagatgtgttgccaagccctgggggagtggcagggccccccacccctgctagggagggaaggcagctattggtttctaccagcccctccagagagaacagcagtccacagaccagcttgtcagagggccaagggactgcccacccagtcctgacaaggatacagggcttgcgctggtgctgggaagatggggggtgccaggctaagggctgtgttgggcatatgggcacaatcagagtaatagcgaagggagggacaagagaaggctggggccggggcatacgatgaccccccgactcaacacccagtgccagtaccagtaggacccagagggttggcacagcacaagcacccatgaaggcaggccctggggtctgttccccgagtgggtggccatgccccaatccacagtgctaatgggaggccccaggagctgcctttgaagcccttccccaaacaccacttgccatgtgagtgtcaaccaggaagtctttattgagccagaagagcaccccaaccccccaaatccttgagaggctaatggagaacaggggtggggtctctaagggggggggcgtagacaggtggggaggaggctgaatgggcagagcagacagtggaggtgaggacctgccagaaaccgaggaagcccctgctcctcgtcagggccaggtggtcactggtcctgcctgctcagccaccccaaggctccagaatcacccctcccctcttccttccctgtcggctttgccccagccccccacctgggcctcccccgagcctccgatccattctccatatagcagcctgaagggtgttttggaaagctcagacctgacttgcctcccagagaccctcaagaaacaaggtcaaattcccacctcggcctgcgagactcctgtgtgggcaggccccaggggcacctttcccaatggcgacagcctgacctcctcccttgaccaggccccctccttcgtcccctaggtccagaaccagccagcaagcacctccctcggtccctgcagtctcctgctgctgccgcctactcatccttccttggtctcagcctgagtgtcccctttttcgggaagtcttccctgatgtcccacacccaggctgggttacatggcccctctgggctgcccagtcccaggccacccctctcagttgttactggccagggacttcttgtctctccctggactgtaagccctggaaggacagggctagggctgtctttcctgtgtccccagcactacccaggatggatatgggtgagcagaggtgctgacttttcttaatgctggactaccaggagtgggtctagttatagacaagctccccagaggaacagggtggtctacgggggagtgaacagtgcacaacaaaaggactcgactttgtgatctggagcttagagtgcaaccaggaagactgctggtgcctgagcaggagaaaaacttgggttgggtgctggggacaccagctggagggttgtctggcctgcagcgtgcacgcctgggcgtgttgaagggtggggtggtgtagggtaggccctgctgacccctctgggggcctcactcctggtggcctgtgtggcctctggcaaggccctttctcctgggccaaggatcttcaggggcctggctcctggtggcctgtgtggcctccgacaaggccctttcttctggacctaggatcctcagggcttctaatctgggtccacaaatggccttggggtgtgtgtgtgtatgtgtgaaccccctcaaactgtatgcaaataatatgagcatactgtcctgggaatgggctagaactttcctcagatcaccaaaggggtcggggaatgtgaagaccacagccctggcctatgagcctggagatctttcctccctgctggtctcccacgagaggccttggtgcctcctgggttttataatgtgggtttgacatttccataagctgctctcttgaccttaaacgtttctcagagaacttgcagaggaaggttaggaagtaagtcactgaaaagctgtttcaagctagaacacgaaagtaagcagcacagagaggaagccccttcccgtctgagggtgagaagagaaatcaaaggacagcagtcttctgagtatagagggcgacagtgagggtgtccagctccgtgggacaggatggctcctggcccagaaaccttgctcaggagggatggaggggtgggcgctctcaggggaggtggtccttagacgcggaaccggcagagctgggattcccacccaggtccgtttcacttcagattctgtttcttctaccacaccacttagcttctgcttggccctgagtaagtcacctaacctctctggagcctccatttcctgtctacacaatggaagtgaacatacccaccaagtggcggaccagcaggctcaggcctgtaggcgttcagggagagcccagcgcagagtgctcagtgagtgggggccatcgtgaggcggccagttcgtcaccaaccctgccgccctgcaggcaagctctcctgcctcacctaccctggcccacaagtgccctggagccctgggtctgccctgctgctgcgcctctaccactcacggtgtgccctgcttccttctgttcctcggggctaggggtggggctacccaactgctttaggcccactctgtgccagggcacagcaggtacatcagaggcagaaaaaggtgggttgtaaagggtaaaacctgggaggaaggaaggaggagggagggagggagggagggaagaggaggcaagaaaaggagggagggagggaggtggctctccagagctctgaggtggggctgtgagtgacagtctttgacttggcagattccagtgggggcatgtgggtgactgaggtcctgccctggcgtcgcaggggccaggccactggagtgggggggaagcgcctcacctttgatgatggatttcatgtcgcacttcacggagtcaatgttgtgtaatgcgatcaggagctctccagggttcagcggggacaaggctgagtttccctcacctgcagcaggcgggaggaagggtgggggaagacagtgcggacgcataagtgaagagatgggtctgagttccccagatcgggggagctgcgagcaaagatgaggtgccctctgctttcagggctggaacaggggaagcgactgacaacataaaaaggggacaccgaaggcagcagcagccctcaggcagcgtgaggttgccactgtgtgctcctccccatcctgggctcccaccctgggtagcgtgtggcacggctgggtctctctgcccctgggctgtgcacccccgagggcagggtaggaccacctcctcgtgtggtccccaacacagactccaccgcggcacagggggtcatgggcatttgtggcacagggcaagatggagccaggctacaggcttccaaaaagtggctggagccttctgctgtgtggggcctgggggagtggaggggaggctggtggagtggctctttgctgctgctattttgatggtcccagagccatctatatgtgtgttttaaaccaccagggtctgcgtggaacagacatcctccattttttctctagcaccaaccactggggtaagggtgaacaatcccttgctagtttttctaagttgaaagttttgcttctttttttttttttttttttttgagatggagtctcactctgtcatccaggctggagtgcactggcacgatctccgctcactgcaagctccgcctcccgggttcatgccattctcctgcctcagcctcccgagtagctgggactacaggcgcccgccaccacgcctggctaattttttgtatttttagtagagacggggtttcactgtgttagccaggatggtctcgatctcctgaccttgtgatccgcccgcctcgcctcaagttttgtttctttttgactgtgtcaaaacgaaatgcccctggcccacagcttgagggattcgggcaagatctgaggaggggccagactggagccgggcctgagaggggctggtgtgtggccagatcctaaaagggaagatgctgctggagcctccgcccctagctccacggtcttgcccctgctgtgaatgaaaccatcataaaaatatcccagagggtggcctgggagctccgggacacatggagatgtccagtacagctggtgtcccagggagcaggatgtgccctctctccctgaggggggtgcctgcaccttgccttctgccccagcacctggggtgggtgggcctcttggtggggatgaggctgcatcacctaccatgctgggtgcccagcaggcggttgaagacttccttcaccacgatggggttgagtttgatgagtttaggcagggcctggatcacctctttctacagggagaaggtggtgggggtgggagttgagtcacatacaccctcatttcccttctagacaagccaccccttctgctcgccctggggagctgagggcaagctctggctcactgagcccctcctaccctcaccacaccctcagggcggagctttctccccagctctcaccccatctgagccccctgcatgtcacatgtgtgtgcccccaagaggcatcctgatccttgtctgacagaggagaaaagcgagtctcaaagaggggaagggacctgcttgaggtagaggaggaagcagcagagccattggcacccgggtgcccatgcaaatgaggccaggagctgctccgcatttccagggtacccaggtgtcggcggcttccatgacttctgaccacaggcaaggtgccttctgccctctgctatgtgcctctggctcaactgctgctgaagcaacgtgctgccctgcccctcccagtcccacatgtcccaggtagcagggacaaacaggcctccagctccataccttctccagcccattgagcaccgggatgaggaagcggacgtctggcagtcgcttgtggtagagatcccggacccgcttcaccagctctggggagggtgggactgcatggaagcagcaggaggcaccaagttggaggcggaggggagcgtgggaaagggtgggcacccaggaaagagaagcaggcaggtgtgcaggaagggatggcaacttcacccttggctgctcacgtgcaattagcaccacactgttccaaatggagaaactgaggccctaggacaggcacagacccgcaagaggtacgaccatctggggacccagcagctcagatccccagggcccggggaaggctaaggagagggaggaaagccatgaaaggtgggggtctccagggtcacctttgtctgtgaggctgtgcagacatctcgtgaccagtgtctctgctcccttgggacaattttccaccagcaggagcagctccggggagttcatgcccattcctcggatctagaggcagagacagggatgaccagacccagggtgagagcttaggggagggtcaggtgttgcccggcagggtggcttgcggggcatgctggcgcccagggtgagactgaggtgacagggtttggagggcgggggaaaggtggggaagggcaggagagtcagaagaaccttggcatctccctgcagctcctccagacatgggcctgctccagctcccagccctggctgggctgtcctcctgcgggccactcctctgtggctcagacttgacctgacctcgaatgcccaccctgtgcttcgttcactggtgaagatgtttctggctccacccacctgcttcgtgactcggtttctcaggcgcagctggcttggctgcgagcccagaccaggctccacctgctgctgcttcctgagcctgctctgcggtgaatgccaaacaggagccagggccaggctccacctctgcccagtaacgtttacgctcctgactaaaaccgactgtctctgccctcgagaagctcacagccctgccagataacttttctgcaaagtgagatcacttttccacagctggaccaccttgagaatggggctaaaaatctgtttcctcccaactacaagcctgttatccccattttccaggtaagggccccactgaacccaaatggcagataggtggggattaacatacacttctctctcccgtttatcacgaaaatgttctgtaatccaaaaatgtcaggggcagaaagaaaaaaagtggtttcaaatcctgctgcaaactggaagagcagaccttctaatctcaggtgctagtctgtcactgagctgcttctcatgtgggcagacctgtgcctctagagagaggggcaggaaggacttatgtttatgtaatgacagctaaagagtcccgttagcaacactgggaaggccagctcataaagtgacagtaacacagaggtttatgtgcctgagttcatggactccttgcatcagcgtggagggactggaacgtcttccccatttttactgacgggcccaaggtcgcagtgagaaagcgagaagtgaacgcgaacccaggtctatcagctccaggctcctaactgccgggccacttgacgtttcctcaggagtgacatgcggaccgcctgcaagctacacagcctgggtcggcccggggtgaccacccttcgggcttggcacactctgaggtggagcaggttggggaagagctggagctggggacacagccttgcccgtgggtgggcagggcctggtgggctcaggggcctcaccggctgctcaatgaccctcagcaccgtccgcttgatgtcggcgatggcttcagtgtacacggccgccagttcgtggatcagcttgtggttctgaggcaggagggccaggtagaggtacagacactgcttcactgtctcctccgtccagggtgctgccacctctgacagggcaggagcgggcatcagattggcccacactcttctccaaccccctcggaccctcaggaatgtcccttcttgggcagtggagccggggagggcagagaagggagccggggctggggagctaattgttctagggcagggaaatggcggggaccaggacttcccacctccagcctcccgtgactgccaacacacaaggcaactagaaggatctttctaaagtgcgatcctgaccctgtccctctctggctccaatcccagccatgcctgccctgtggcctcagaataaacccccagctccctgcctcacactgtctgccaggtgttgtatggggtggccccggcccgctgctgctctgctgccctccatgttggtcacatacccattctaacagtcccgagggccctggtctctttgcctttgcatccaccctcctctttgcctggtccacggcacctgctcagcttctgggcctcccgaaggctgtgcatctcctgggaatgcttcctggcacctgggccaggcctcccgtgctgccctatcatggcccaagccttcccatttaatggtccatttactcggggtctgagtctacctgtctgtaatccagggctctgctgagggaacctgcctgagatggccctgcctggtccttcctcaggccccaccgatggctggctctcctcgtcctccagatctctctccctgaccccccaggctgggccagatgccccctaccctgactcccacagcccccaggtggctgtcccagtcctgcccattcccgtcactcgtgtccgagtggcttccccactcatcccctctgctcgcagggcccagagcgcggacacagcagcgctcagtatgcatctgatgacctgtgcccaacctgtgtccttgtcagctccaaacagcacagacggtgggttggggtgcaccaggagctgcaggtagttgagggcaaatttctccacatactcccgcagctgctccttctcatacatgcgtttgatgaacagcagggcctgggagcgcacctgaggaggaagatggagaagggcagggtcagggaagaggtaagaggaagaacagctattcctgcgagcatggcaacactcacgtgaaaacaagcccgaggctgagaaggggcagcccagctgttaccagggcccagggctggtccccagtgcaggaggcagatatcctggccagggccggacccgcagcaccacctcactgcctgcctctccagcccatctgcccatcactgcttcttgccttgctcactaagctccaagcagagggagagctcctcagttccttaaaagtgccactccctgccaagtctccctagaacgtctactgccagctaaaccctgtttcactcagatatcatctgccaggagccgtgagggaagggtctggtcctgggcactctgaccccagcagcagcacatggccatggccagggccagggccaggggtgtgagatgaaggtctgctgaatgaatgaaaacgctacccagcaagggctggggcaaaaggctgcaggcaacgatgggtcaagggcgctctcaaccacagcacgtgcacatctgtcccctctgtctagagcacacccagctactgattttccaggtctcagcgtacaagtcccctccttgaaagaagccttccttgaaacacctcccctgcccaccccacaaccagatggtcggcccctccctccccagggcagccacacactgctctgctcagctgctgagcacgctgtgtcctcactgctggctgaggccacaccggctcccctgctgggctgggcaatgccctcaggccccggcacaggactgggctgcacgaggagcctgtgctggccaccacgggtggactaagagcgagagtgggactgcccttcccaggagggcaagcgcacgtgtgtgtgtgtacacactacaggcagactcaggcacggtaaccctggtttctaggcagcttgatgccactgaaaatgaaaataaaacagacagaaatagccaaaaaaccactgaaagaagggaatgggcccagagaaacttgcaagggagtgtggaagacgtgggctggttactcaggatagaggcggcctctgcaagctgcaggctgagggcagccaggaagtggaggaggggatcaccttgtccttctcatgggagctgaggtcgaggaggacatgcaggtactggaactggcgggacgggcgcttgaagatcaggtctcgaagtgtggacatgcccagataggtgcgactctgcagcaaaaggaaagggacccgagctcagcccacctgagtgtgcctctgggctctgtctttcctgcctgcctctgatcaggtacctggacaaaagggcccggtccctcacaaaacccccggccacaaggtttagactgtgtgcccttcagacccctcagggcagggccctgtcccctgccccgggctgcactgaccagggcctgtcctcacctcatcctcgcagtacttgcggaccacctccagggcactctctgtgatgagtggcgcctccagcacaaccttggtgaagatcctgccagagatggagggagggccatggctgcagaggaagaggccgcctggctcccgggccctgctgaattgtaggagctcagggccagcaggccctccctcaggggctgcttgttcaagcccctgcttataaagctttggaggtgaacagaacagggttcaaaagctggcggctggatgatctgggcagagactgcacctctctgaaactcatttcttccgtttgtcaaacagggattcctaactttattcactgaacataagaacgggagggaatgatggcgggtggagaagggtgtgggtattttagatatggtggcctcaaaaggccgctttgaagttacagttgagtacactggtggatgagaaggagccacccacacatagagttgagggaagagcattccaggtggacagaacaggaagcaccagcgccctgaatttgacatgttcgaggaacagacagaaggccaatgtggctaatgttcggggggtaaagccaaagagattgggtcacataaggcctcactggtcacagtaaggaggctgtgttttatcccaagaccaatggagaaccatggaaggttccttgtggggaagtaataaaaggatttatataataaaatgttcctggagctgctgtgtggaggatagacgagtaagctggaggccacggatagggaggaagctacagaaccaactcaggtagtgaatggggtgtagagaagtctatctccaggcccatgggtgagcactgttatttacagatgggaaaatggcagagagagggagtgacaaagccacgcagagcaagctcagagcaagtggcagagctgaggaacagctcagggagtgcgacctggagcccacatgcaaaactacaaccttgaacgtgcctccagagggggaggaggagaggagacttgggatgggtgcgaggaggactgactcggggggtgacgaagagggaggtggtcgcaatcagaaagggagggcagcaccaggagaggaagcctctcggggacaggagggtgcagggtcagccccctcacccatccttctggtctggtttctcctgcaggccagacaacaggcggatgaggcagtcctcatacttgtccagggagcccgaggcacctgcggccaggtaggcgttgtactcctggtagagccaggcgaaggccaggtccaggcgggcccgcacatcctccaggatgaaggacaggacctccgccttcaggcccgagttgaactgtgtcaccaggctggccaggatctttatgcggacctggtgggagggtgagccagcatgtcagtgtagggtgggcaatccagggactccgcaatcgtgccctgcgacttctcccacccagacgcaggaactctcagagcagacaaggagtgaagcgaggaaggccagccgaggacccttatgcctaggaaggtcccgtttgtgtgttggggggtgggggtaccagggtggggatcgatcatcacagaataaaaatgagtttctaggagcagcacccatgtacttaagtgcacagaaaaagatcctcaaagattcccctcatttgtgcctttgtcacctttgaagagagggatggggtgcaggtgatggccacggaagagtactggatctggattccccggaaatatttttcagctcagggagtatgttcctatactactggctaatcaacaattaacttcacagaatggggaaaaagtcacttttccccattctttgaaggtaacagtgccagcaagtggcagaatcaggacagagaaccaggtatatttctaaagctaaatagtaacagtaagaacgttaacaaccgtgaagaaccaagaccacaagagcagccctcacttgcagaggcctcccagcacctgccctgtgcacctgagtgcctgtgctcattgcacatttcctcctcgtcacccaggaggagctgctgctactgtctctgttttatggaggatgggagtgatctggagaagcggctgtgggcagcagagctggggtccgcagccagggaggtttgacgccagggccagactcttcgctggatgtgaggtagacgtttgggtagagggactggaaggatggggtggggggtggcaggcgcacacctgggctgccccgctgcaggccacagccttctcagcccgcaggatccgcttcacagcgcccagcttcatggcttccacctgggcatcggtaaggggcttcagcacgtcgctgagacggaaaattttcttgcgcccaccagcgcctgccagcctgtgtggaagagcagtgacagagatgcagtgacccagactgcagcaaaggcctgtctggtgactctcccaacttcaaggactaggtaggcaacagagatggcccccatccccctgctgcctctccagttcctctgtgtctctgaggcacggtgtggcggtgggtaagaggaaggaagaggatgttattttggttttgcagagggcgtcttacggaaggcttctgtgagtggggatctgaacggaggcagggacaagatacacaaatgtctgggggaccagctctccaggcaaaggcccttaggtgggaacagacttgtgggcacgagtggaggaggggtgagggtagcagaagagagctcggagggtagcagatcccgctcagctgtgttagtaagacttggggctgggcacggtggctcacgcctgtaatcccaacactttgggaggctgaggcaggcggatcacgaggtcaggagatcgagaccatcctggttaacacggtgaaaccccgtctctactaaaaatacaaaaaattagccaggcgtggtggcgggcgcctgtagtcccagctaatcgggaggctgaggcaggagaatggcatgaactcgggaggcggagcttgcagtgagctgagatcgcgccactgcactccagcctgggagacagagtgagactccgactcaaaaaaaaataataaataaataaataataaaaagacttgggtggccgggactggctggattttgtggtgtgtaagggaggtaataatggggacaatgatgatgacagccagtagcatttactacacaacaggaaccacgcgaaatgcttgacaatcacaatcacttttcactcgagtatctagttacctaaccatcaccattaccacgaactaatttaattcttctttgatccttatgagaaagatactatcattatcctaattttagacataaaaaaggattttttttttttttttttacaggaaagagaacagcaaaggcttagtggttatggcactgactcgggagtcagagagaacctattccagacttccttctgtctgcatctcagttacacacacacacgcacacgcacacgcacacgcacacgagctgagaaccagaccttcagggtagggctcctgtcctgccctagcacccagaagaggactcaccggggctgagtgacagggataatgggctctggcctcctcttggcctgcggtgcctcttcctccaggggggacatggagctcagggaacccaccaccgagatggcttggccctgggctgacaggcgccgcttgatcaggacgctctctgtcttcaccaccttctcctccttgggctcctccttgcactgtttggtctgctctacacctgagggggaggcagcaaacagacacccagtgcgtcagacccacctgctccaacccgaggacctcctgtgtgcctggctctgttctgagccctgtacacacaaaacctcgtttaaatccacacaacactgtcctggagtgggtactctttttatccccacttttcaatacaactgaggctcaaactagaaatgccattcattgctggggggagcagcaaatgctacagccactttggaaacatgatgagcagtttttgttttttagactgggtgtcactctgtcacccaggctggagtacggtggtgcaatcagggctcactgcagtcttgacctcctgggctcaagcaatcctcctgcctcagcctctcagcctcccaactagctgggactacaggcgcatgccaacatacctagctaatttttgtatttttttgtagagatgaggtctccatatgttgcccagcttagtcttgaactcctgggctcaagcgatcctcccgccttggacttccaaagtgctgggattacaggtatgagccactgtgcccagccctcagctgttttttttggagacggagtctcactccatcaccaaggctggagtgcagtggcttgatcctgactcgctgcagcctccacctcctgggtccaagccattttcccacctcagcttctggagtagctgggattatagacacccactgccacacccagctaatttttttgttttcagtagagacggggtttcaccacattggccaggctggtcttgaactgctgacctcaggtgatccacccgcctcagcctcccaaagtgctgggactacaggtgtgagccaccacacccagcctgtagcagtttttaatagcactgatcacaccctatgacccaacggttccactccttggtatatgctcaagacagatgacagcatgtgtacatgaagagagttggacacaaatattcacagcagctttattcccaatggccaaaaactggaaagaagccacaggtccatcaataccggtgtggataaacaaatgattgtatattcatatgacagaatactactgagcaataaaaaaccaactagtacctcacacgacaacaatgaagaatctcaaaaatgtacagcaggctgggcgtggtggctcacacctgtaatcccagcactttaacaggccgaggagagtggatcacctgaggtcaggagttcgagaccagcctggccaacatggtgaaaccccatctctactaaaaatacaaaaaaaaaaaaaaaaaaaatcagccaggcatggtggcacatgcctataatcccagctacttggaaggcaggagaatcacttgaacccaggaggcagaagttgcggtgagccgagatcatgccattgcactccagcctgggcgacagagtaggactccatctcaaaaaaaaaaaaaaaccgtgaaaaacaaaaaattagctgggaatggtggcagcgggtgcctgtaatctcaactactcgggaggctgatgcaggagaatcgcttgaatccaggagacagaggttgcagtaagccaagaaagttctgctgcactccagcctgggccacaagagcaaaactccatctcaaaaaaataaataaataaaaataaacaaacaaaaaaacacaaaaaaccatatggcaagccagagaaaccagactttgtgatcctatttagttttgttcaagaataggtaaaactagggccgggcgcggtggctcacacccgaaatcccaggactttcggaggccaagacggacagatcacaaggtcaggagatcaagaccaacctggctaacacggtgaaaccccgtctctactaaaaatacaataaaattagctgggcatggtgccgggcacctgtaattccagctactcaggaggctgaggcatgagaatggcgtgaacccaggaggtggagcttgcagtgagctgagatcgtgccattgcactgcactccagcctgggcaacagagtgagaatctgtctcaaaaaataaaaaataaaaaaataaagaataggtaaaactagtctatggaggcagaaatcagaacactggttttctctggagttcaatgccctgaggcatctctggaagaacaaggaggaaatttctacagtggcaatggtctataaatccgaaactttctgagtctcaacaaaacacaagggtaaaattccacacctgacctcgtgtggatagatggcagtcaaaacatcatttcatgaacaaaattattaagaaatattacaggtccagtgcggtggctcacgcctgtaatcccagcactttgggaagccaaggtgggcggatcacaaggtcaggagattgagaccatccttgctaacacggtgaaaccccgtctctactaaaaatacaaaaaactagggccgggtgcactggctcacacctgtaatcccagcactttgggaggccaaggcgggtggatcacaagatcaggaggtggagaccatcctggctaagacggtgaaacccccgtctctactaaaaatacaaaaaattagccgggcgtggtggcaggcgcctgtagtcccagctactcgggaggctgaggcaggagaatggcgtgaacccgagaagcggagcttgcagtgagccgagatcatgctattgcactccaacctgggtgacactgcaagactgtgtctcaaaaaacaaaacaaaacaaaagctagccaggcgtggtggcatgtgcctgtagtcccagctactcgggaggctgaggcaggagaatcatttgaacttgggaggcagaggttgcagtaagccgagattgcaccactgcactccagcctgggcaacagagcgagactttgtctcaaaaaaaaaaaaaaagaaaaagaaatatcgtatataattacctttgagctatgtttagctcattatgagctaaacataaatgaatttcatgtttagacttggatcccatccctaagatacctcattatgtatatgcaaatactccaaatccaaaggtctgaaatctgaaacacttctggtcccaagcattttggataagggatatttaacctgtatcttgatctgggtgatggttacactggtgtgttcactttgtgaaaattcactaaggtctataattaagagttctgcatttcacttatgtgtatcacacattaatagtactgttaaaacagggtaaaactatgaagctcagagaggttaactaacttgaccaaagtcatacagatattaagtggatgagatctgattcaactcaaacttcaaacccaggtctgttggattccaaagcccaggacttaaaaacactgagccatctatctgtggtacctgtcattatctacaccttagctcccacatgattttcaactgcaccacgagaagttgctcttccagtaaggagaacccagaagccacaagtgccaatccctggcccaggttagggccaggacacactcacctggtcccagtccggcagctgtcatctgtgtggccatgagccgagccaggtgcttgatctgggcttccgtgcctgctgactccacgggggtgtagatggcctggaaggaggctggcatggcctcgggtaggtacaccatgctgatgaggacctgtgggatgcccaggaagagagcctctccttaatcattaactcaagaagcattctttccatgcccatgccaatactggggaaatggcagtgcctaagaccgacttgggcctgctctcctggggcccagcctcttctggaagtcacagagaaaacaaataattatatagtgtagtgcttgagagggtaacatgaagggcactgtgagccacagcaggagccaggcaaggcaagggctccctgtgcaagaagcacctaggctgagaactgaggggagggcaggagtcagcataatacaggacaaggttttgaggtgggaggggtgtgtattccccgtagagaaacaccatgggagaaggctaagaagcagcagagctggcaccctgtccagagaacaaaagaggccaggtgcagtgggtcatgcctgcaatcccagcactttgagaggctaaggcaggtagatcacttgaggtcaggagcccaagaccagcctggccaacatggtgaaaccctgtctctactaaaaatacaaaaattagcctggcgcagcagcatgtgcctgtaatcccagctactcgggaggctgaggcaggataattgcttgaatccaggcggcagcagttgcagtgagccgagatcgcgctactgcactccagcctgggtgacagagcaagactccatctcattcataaagaaagaaagaaagaaagaaagaaagcaaaaagaggttcagtgaagagtgttaggactgggaattgacttcaaataacaagcaaacaagaaaccccccagaatcctaacagagaacatccatggatgtcaggaattagtaacaaaagataatttcctttttatttatttatttattttttgggacggaatctcactctgtcccccaggctggagtgcagtggcacgatctcagctcactgcaacctctgccgcctgggttcaagcaattctcctgcctcagcctcccaagtagcggggattacaggtgcctgccaccgcacctggctaatttttgtatgtttagtagagatggggtttcaccatcttgcccaggctggaaaaggataatttcaaacttcctatacatttgaagctttaaaaaaaatttatactgggcacggtggctcatgcctgtaatcatagcactttgggaggctgaggtgggcggatcacgaggtcaggagatcaagaccatcttggctaacacagcgaaacctcatctctactaaaaatacaaaaaacttagctgggcgtggtggcaggcacctgtagtcccagctactcgggaggctgaggcaggagaatggcgtgaacccgggaggcggagcttacagtgagctgagactgcgccactacactccagcctgggcaacagagcaagactctgtctcaaaaaaaaaatgtattatttttcttagagacagggtcttactctattgtccaggctggagtgcagtggcgccatcagagttcactacagcctcaaattcctgggcttaagcaatcctcctgcttcagcctctccagtggctgggatcacaggtacatgccaccatgcccggctaatttttttatttttctttttgtagagacagggtctcgctatgttgccaaggctacacagtgaactttaaatgcacacactaagtaataactaattagaacagaaagataatgaaactgctataaattaaaattgtggaatacagctaaaatagtactcagatggaaaatcaaatccttaaatgcttgcttacattggaaaagataactaaagattaatgagccaatcacttaaaaccgtgggaacaaacattcaaagaaagtagcaggaaagaaataaaggcaacagaaataaaacagaaaaagtgccaaaagaatatgaacaaaacaaagagctagttatttgagatgactgaaaacaagcaaatattttgcaagattggacatagtagtagcaacagaaaaggggcacattacaaacatatggtattttatactatgaatagcaggcatttttataaatgttgatgagcaacttcatggcaaaactgaaaaggtcaattcctagtgtgtgataagacaaaaggtagaatggccgggcatggtggctcatgcctgtaatcccagcactttgggaggccatggtgggcggatcaccagaggtcaggagttcagaccagcatgaccaacatggtgaaaccctgtctctgctaaaaacacaaaaattagctgggtgcagtggtgggcgctggtaatcccagctattcgggaggctgaggcaagagaatcacttgaacccgggaggcggagattacagtgagctgagatcgcgccactgcactccagtctgggtaacaaagcgagactctgcctcaaaaaaaaaaaaaaaaaaaaaagacaagttaacagaagccagatcaaagatggctgactaaggcaagtggaacttaaattttacttgaaggaagttggagccaggtagcaagtgagggttgggcttcaggtgaaaagggtgggcctggcccagggtaagtgctacaggggtggaaaagagggcaaggattagggagagaaggaaaagaggttcactcccaggtttctggtttgggaactgggaggggcctggagaggagcgtggggagaaagtggaaaagtgtagttctgccacatgagtctgaggtgctcctgggacgtccaaaaggaggatgatcagaagcgggttgcatacccaggcctgaggctcactgatgtagtctggatatttgttccttcccgaatctcatgttgaattacaatccccgatgtgggaggtggggcctggtcgggggtgtttggatcatgggggcagatccctcatggcttggtgctgtcttcaggatagcgagttgtcacaagatctggtcatttaaaagtgtgtggcacctccctgctccccaacactccctttctcctgctcctgctctgccacacgagatgcctgctcccccttcacctttcactatgattggaagcttcctgaggtttccccagaagctaagcagatgccagcaccacgcttcctatacagcctgcagaactgtaagccaattaaaccccttttctttattaattaggagggtactctggaggaggtggatggtgtgaagtggaggcaggtgaaagaccgaggagatccttccttcctgcccagggggaaaacgctccccacccatcctcaccagattagccacattatcaggcgtcagcagaggctgcaggaactcagctgtgatgtccgtgtctgactggccggagatctgcgctgaggccttcgaggtccccgacgggcctggctccaagtctttgtcctcatcgtcctcccccaggttgggctctgggatgagggaaaagaacaagatgctggctatagagagagctgcaggccctccatccttccggggtgcccgggtggtccctgcctctagtcagcctcagcaaacaggagcaaacagcggatgaagatccaggctgcagctctgcctctggtgccaaaccactttatgaccctgggcaactacctgactcgttctgaacctcagatctcctgatctgggaaatgggagtaagccacacccctgcagcttatcataagctctaagaagagattattattattactattttttgagacagtcttgctcgtcaccgaggctgcagtacaatggcatgatttcggctcattgtaacctccgcctcccaggttcaagtgattctcctgcctcagcctcccaagtaactgggattataggcatgcgccaccaggcccagctaatttttttgtatttttagtagagatggggtttcaccatgttggccaggctggtctcaaatttctgacctcaggtgatccacctgtctcagcctcccaaagtgctaggattacaggcatgagccaccacgcccagcctggtgcagttttttagaaggcactttggtaatggctatcaagaatgtacactcggtacctaagggcacacctgggctcagaccttgatttctgaaactattccccacttaaaggaaaccagggttccttaaaaagaaagactgattccagggctggggcaaggacagtacaagaggagtctagaacatcttgtcatgctagtaagtaagtgaaatgctcaaaacaaattcctgatagtaagtgggaagaagaagagaaagttcttccttacagcagaatgtcaactgataaatgtagaaggaaaatctctttggagccagtatagaataatagactcaggcaacaatcatcactggatgttaaaaccactgggtgaggctgggcgcagtggctcacacctgtaatcccagcactttgggatcatgaggtcaggagatcgagaccatactggctaacacggtgaaaccccgtctctactaaaaaaaatacaaaaaattagccgggcagatggcgggcacctgtagtcccagctactcgggaggctgaggcaggagaatggtgtgaacccaggaggcggagcttgcagtgagccaagattgcaccactgcactccagcctgggcaacagagcgagactctgtctcaaaacaaaacaaaacaaaacaaaaaaacacaaaaaaaccactgggtgaacgtttaaagagaaacatgtattttacatagtttcaaatatctcccccagcttattactgacaaagataaaaatggcacttgacactagagaaagctggttgaaactgtgttaaccaagcgttcaaaagttaatatctccaacaatgggacaccatgtgcctcctgatcccatgtactgaggcaaccaggggatcacctgaggcgggtggattacctgaggtcaggagtttgagaccagcctggccaacatggtgaaaccctggctctactaaaaatgcaaaaaaattggtcagatatgatggcgcgcaccagtagccccagctactcgggaggctgaggagggagaatctcttaaacctgggaggcggaggttgcagtgagccaagatcaggccactgtactccagcctgggtgacagagcgagactgtctcaaaaaaaaaaaaaaaaaaaaaaaaagacaaatttggtgggtaaaatataactttaaatatacaaaccctggccaggtgcagtggctcacgcctgtaatctcaacactttaggaggcgaaggcaggcagatcacttgaggtcaggagttcaagaccagcctgaccaacatggtgaagccccgtctctactaaaaagacaaaattagctgggcatggtggcacatgcctgtaatcccagctacttgggaggctgaggcaggagaattgcctgaatctgggaggcagagcttgtagtgagccaagatcccaccactgcactccagcctgggcaacaagagtgaaactccatctttaaaaaaaaaaaaacaaacaaatacaaaaattagcccggtgtggtggcattcgcctgtaattccagttactcaggaagcagaggtatgagaattgcttgaacccgggagacagaggctgcagtgagcccagattacaccactgcactccaatctgggcaacagagcaagactgtctcaaaaaaaaaaggatgaggtagatttctataaagaactccaagatgaaagtaaatgaaactaaatgaaaacaaggtacagaatactctgcttagtatacttaattatgaaaaaacatagtaagatccctacctcactccttagataaattccttttttttttttgagacggagtcttgctctgtcacccaggatggagtgcaatggtgcaatcttggctcactgcaaccactgcccccagttcaagcaattcttctgcctcagcctcccaagtagcagcaactacaggtgtgcaccaccacgcctggctaatttttgtatttttagtagagacagggtttcaccatgttagccaggctaatttcgaactcctgacctcaggtgatcccctcaacttggccttccaaaatgctgggattacaggcatgagccactgtgcctggcaattccccccccaccttttttttttttgagacagagtttcactcttgtcacccagactggagtgcaatggcatgatctcggcttactgcaacttctgcctcctgggttcaagtgattctcctgcctcagcctccagagtatctgggattacaggcatgcaccactacacccagctaatttttgtattattagtagagacggggtttttccatgttggccaggctggtgtcaaactcctaacctcaggtgattcacatgccttggcctcccaaagtgctgggattacaggcgtgagccactgcgcccagcctaattccttattttttaaaatgaaaaaataaatctttcgtaaatgctctagaaaaaaagtgtgatttaagaaaaaaatcttaaagttaagaaaagccatagttgacactattgataaataatacaaccactagaaaattacttcagaaagaaaattatctgataactaaaacaaaggaatgaaagaagagctccacactctacataaagcacttctggaggaaaacataaagaagtgttcacacctggggagtggttacttcttgggagagggataagagggatactattttcattttattcctttctgtaaaatttaaataatgcataatttattaaacgtatattttgataattctattgtaatttatatatcatattaaatactgtaatttatttttataattattttataattttttaaaattagagacagggttttgccatgttgcctaggttggtcttgaaccccggcctcaagtgatctgcccgcctcagcttcccaaagtgctgggaatacaggtgtgagccactgtgcctggcccacataacataatctataatataatcttagtaaatacaaattcagcatagtttaaggtaaataatgaaacatttcagcatggtctgcctgccccaccccaccagcccctctcacccagcttcatcttcttgagtgtggagtccgagtcatcgcggggccgcttgcgggtgtccttgctgctcggcatgttgcgggcgatctcggcctgaggtgtgcccaggtccaccagcagggtggtgatctgggcctggaactccaaggaagccgggtgcttcagcacactcaacaggtgcagcttcagattcttacgcacactgctcacctgcgatttggccagcgtcgggggcaggttggctgtgaggaaagtggcaggagctgtgtcttgtggaagatctcatggcatgctgccagtcttaattctcaaccccaaacttgggcagtggtcttgcaggcatctactagaaaagttccttcaccctcagatctaacgtgtggctttccgccttacaagctgatgcttcaaaccctgggggtctccatcagtatcagtcaatcttaaagagaaaaactcaccctctcttttagtaaatacatacaatttcgtcctcctccatctctggtctggaaattcacatatgcttcgcttggggagggttataatcaccacttttgcctccagaaacccccaactgaactgctgcaacagctcactgctagtctccctgacgccaggatgactttctaatggtcaccctgataagtgagcctcccctgttccacagtgaaaaaggatgcctgtaattctgcctgcctagcatccactgccccttcctcagccaacaacacaacccactctccgttaagggagaccccccttctccagtctccttccgagtgggcatgagacctggggccagtgagaataccacattcccttggccactgtaattggctcagagactggctcataatctctgctcagccaatcagaaacaatgaccgtcagcccttggacttctgctggaatggttgggaaggagacactctctttcccatggtgttgctaagtgaacggaatgggagccatgaactatggggggccatctttgctaccctaaggaaagggccagagagtgaaactaaaatggagaaacaaagagctgagagatggagaaatgcagatccacgacctgtacgcattcataccccaaccccagacttctcggttttcgtttcacaaaacagagaaaatggtatgagtctctgtgtacccatcaacatttcgctaatcttggaacatctatcctcccttttggtggggggagaggactggaatatttgaaagtatttcacagacatcatgtcatttcacccccacatacctcaatattaaagccagtcctgaatcaagtttctgtcacatgccaaaagattcctgtctaatgtagagaatctcaggcctgccagatggatgactagcgctcggggtccaccacggagctacatttctttaagaatgagcaggctgaggccgggtgcagtggctcacacctgtaatcccagcactttaggaggccgaggcaggcgaatcacaaggtcaagagatagagatcatcctggccaacacggtgaaaccccgtctctactaaaagtaaacaaattagctgggtgtggtggtgtgtcctgtaatcccagctactcgggaggctgaggcaggagaatcacttgaactggggaggcagaggttgcagtgagccaagattgcaccactgcactccagcctggtgacagagcgagactctgtctcaaaaaaaaaaaaaaaaaaaaaaaaaaaagaaagagcagactggccagtgaagagaaggcagggggaggggggaggacaatgacctaccatgcagagtttcataggcctggatcacctcagacatgaacatgggtctctggcgggcgatattggcaagggagcccagcgctgtggtcaggttgatggaggagatggcagggtgcaccatgaacttaagcagctgctccaaggctgccttgccctcttcccatagcacgtctaagagacagagaggagaaccagtcagtgggatccgttttcccaggcctctggagacagcagcttttgggactaaaaggaaggacagatcctggtacctagatgtctatgaatggcgggaaaaacagaaaatgtggtggttgattagttctatgagactattaatgagtataaaaatttagttataaggggctagacgcagtggctcatgcctgtaatcccagcactttgggaggccaaggcaggcagatcacttgaggtcaggagttcaagaccagcctggccaacatggtaaaaccccgtctctactaaaaatacaagaaattagcccaggtgtgaaggcctgtgcctgtaatcccagctacttgggaggctgaggcaggagaatcgcttgaacccaggaggcagaggttgcagtgagccgagatcgcgccactgcactccagcctgggtgacagagttggactccatattaaaaaaaaaaaaaatttagttataaagatgttcaaagcatgggcttgcaatagtgaaagactagaatacatgtgtatatacacacaactcaaagtcccttgtgacaccactcccctcaatacagtccccaaaattaatgcttaaaactttggtggatatctttccagacctttcctatacagaaacataacgaatgccatatatatgtttttaacttaaaaaattttaatgggtatatagtaggtgtaaataattatggggtacatgagattttgatacaggcatgcaatgcataattatcaccatcagggtaaatggggtctccatcacaagcatttatccgttttgttacacacaatccaattatactatttcaattattttaaaatgtatgattattttttagtatagttaccctgctgtgctatcaaatactggatctttttttttttccctgagatggggtctcactctgtcacccagagtggaaagcagtggcgtgatctcggctcactgcaacctccaccacccagactcaggtgatcctctcaactcagcctcctgagctgctgagaccacaggcacatgccaccatgcttggctatcaaatactagatcttatttgttctaactatttttttgtacccattaaccattcccacttcctccccaaccgcccattacccttttcagcctctggtaaccatcattctaccgtctgtctccatgagttcaattgttttcatttctagctctcacaaataagtgagaacatgcaaagttgtctttcggtgcctggcttatttcacttaatgacttccacttccatccatgttgttgcaaatgacaggatctccttcttttttatggctgaatagtattcaattgtgtatgagtaccacattttctttatctattactctgttgatgaatacttagtttgctccgaagtcttggctattctgactagtgctgcaatgaatatggaagtgcgggttatctttttgatacagtgatttcctttatttcggttacatatccagcagtgggattgctgaatcatatggtagctcaatttttaattttttgaggaacctcaaaactccaaacaatttttaggctgtagtaagtgacattctcaccaacagtgtacaagtgtttccctttctccacatcctcgccagcatttgttgtctttttgataaaagtcactttaactggggtgagacatttcattgtagttttgacttgaacgccacattatttaaaatagtgaattaggccgggcgcggtggctcacgcctgtaatcccagcactttgggaggccgaggtgggcagatcacgaggtcaggagatcaagaccatcctggctaacacagtgaaaccctgtctctactaaaaatacaaaaaattagccgggcgtggtggcgggcacctgtggtcccagctactcgggaggctgaggcaggagaatggcgtgaacacgggaggcggagcatgcagtgagccgagatagcgctactgcactccagcctgggtgaaagagcgagactccgtctcaaaaaataaaagtgaattaaaaatctaaatgaccatcaacagagcattgcttaatagaatgtaatgtaactatactatggaatatggtatagcaactatatgattctcacagggaaggacgtcactgatactattaagtcaaaaaggctgtcaaacaatacataagaatagttaatatttatggaatgtttactattccagccatattaatacaccaaatgctcatacctacatcctaaattagatgccataataacgatccccaatttaccaatgaggaatcaggctcagagacaagggaaaataggctgtgtgtcagacacaagctactataatgtctctgagatgaaaacacaaagcatggcctcatttttgcaaacagaaaagcaaacaaatgcagacactatgcatatacacatacaaatacctacatgtgcacaggaaagatctgaaaggaaacataatactcttaacagtgtttatctctggaaagcaggactgagggaggggacattattccttttgattcacccatattgcttgacaccaagtgtatatatagtactttttttttttttgagacagtctcattctgtcacccaggctggagtgcagtggcacagtctcagctcactgcaacctctgcctcctgggttcaagcgattctcgtgcctcagcctcccaagtagctgggattacaggtgcccgccaccatgcccggctaatttttgtattttcagtagataaggggtttcaccatgttggccagggtggtctcgaactcctgaccccaagtgatctgcctgccttggcctctcaaaatgctgggactataagcatgagccaccacacctggcctatgtcctacttttataatttgcagttaagaaaactgtaaaactgcccggcgcggtggctcaagcccgtaatcccagcactttgggaggccaaggcgggcggatcacaaggtcaggagttcgataccagcttggccaatatggtgaaaccctgcttctactaaaaataatttttaaaaaaattggccaggtatggtggcgggagcctgtagccccagctactttggaggctgaggcagaagaatctcttgaacccggaaggcggaggttgcagtgagctgagattgtgccattgcactccagcctgggcgacagaggaagactccatctcaaaaaaaaaaaaaagaaaaccataaaactagctagcatcgactggctcacactcatggaacttcactacaaacctgtgagagtggtactatgttatcgtctccaatttacaaaaaagaaaatgaagtacagagacaggtaacttgcccaagttcatgatgagtaagcagtgcagctgggatctgaacctagcaccagggatcttaactactgcacacactgttccagaaatttaaaaccaaaaaagacaagggggagagagggaggggcgtgaaggagaggaaactggtgcagggctgtcaggggtggcagctgaaggcagtactcactgtactggatgtaggggtggtcacgagggatgcggtccaggctgatatcatgctcctggcgtcggggtatctctgagtcagccatgcggggtgacagggtgacaatgaggccctccacaaacttgatggcgtgggtgcggatgccgtcattgtcagagtccaatagcaggatgatgtcccccgccatggcagataccatgtcccagcaggcctcctgtagctcgctaatgacccgtgactttaccatccactgccagcaggccaggaaggaatggaagagacacacaaagaggtgaagacaacgcatcaatcaccaacaccctctgccaatacccagagaaccatgaatgatgaatacattcatttggttaacagttactgagttccaactctgccccagcccagtgctcggtgatgctggagacaggactgagtagtggccaggcctcgccctgccctcatggggatgcagagagtgaccactcagtgtgatgaaggcacacatcttcagggtaaaggactaacagtgctgacttcacaaggtggtggtgattaaatggattcattcgttttattaatgctaatgtacatcacaccatagagtgttcttttcctatcacactccataatcaatatttatgtgattcattaattaaggtctacctccctccttgggttatgagcactgtgaaggcagtaagctgtcttggtcactgctgtgtccccagcatcacctagcccagggctaagcacagaggacatactcagggaatgtctgttgagtgaataaacggatggtcaatggaaggaatgaaggttaagtgcaacttcctgacctaggagacaacgttagctctccatgttatctgttcccacagaccagtggcacatcttgcccataaagagtatgctcggatgctggttttgaaccccaacatattagtttgtcaacgagacatatcaggcaggatggccctgggtggggagggcgctctcacctgcagggccaccttgtagagctgggtcatggtgaggatagccttcttcaccacgttcacattctcgtccctcaagagcatgttgaggtttgcaatgagtttcagcagcaactcaatgtctcgcttgctgagggatggagaaaaaaggggcgaggtcaaggtgtggtcttagagcaagtaggaggagcctgaggtccaggagggaagggaaatcagggacctgtctcaggggaccggaatggcacatccagaagctgggaacagtgcttggtgcctccagactgagccgcccctgaaccctctatctagactggtcctgtaacaccaactcctttgctctctcagggccctgctgttcacataagggacagtaggggcagacaactgtgtgaatttggacaagcgacttcacctcatttagaataatagtatctatccaattgtttatgcaattttttgggaaaattgcaacaatacttgtaaagtgcttagaagagtgcctgacatgcagaaagcattcagtaaacaccaaaaagcattcggtaaacaccagccattgctactttaaagcactttgttttctgtaatcactagttttgcttgcctcagtctgagggctcaaaaagtagggaccctttcctagcttggcaataaccccagcagggtcattttcattgaagaaaaaaatgaagggcctccaacaaatgttcaatgaataaataggagctcagcacagaattttcacagcatacattacaatctgaaatattaattaaatcagtcaaaaaatatgaaacttagctgtcagctacatgaaggcaggaataatacgtttttgctcactgctatactacagcctaacatggatgcctggtacgacagcagtcacatggtatgtatttgctgaatggactttttacaaattcagaaaatttaccacaaattctcccagtaaatggggagataggatatttgggttctggcattgcagacatgagttaaaatcccagccttggccaggcgcagtggctcacgcctgtaatcccagcactttgggaggctgaggcaggtgggtcacctgaggtcaggagtttgagaccagcttgaccaacgtggtgaaaccccatctctactaaaaatacaaaattggccgggcatggtggcgggcacctgtaactccagctacttgggaggctgaggcaggagaatcacttgaacctgtgtggtggaggttgcagttagccgagatcgcaccattgcactccagcctgggcaacaagagcgaaactccatctcaaaacaaaaacaaaaacaaaaacaaaaaaaaacaacaacagaaaacaaaattagctgggtgtggtggcaggcacctgtaatcccagatactcgggggggctgagggaggacaatcacttgactcaggaggcagaggttgtagtcagccgagattgcaccactgcaccccagtctggccgacagagtgagattccatctcaaaaaaataataaataaataaaatcccagccttgccacattctggctgtgtgaccttaagaaaattcacttcacctctctgagactgttttctcttcagttaaagggtcaaacaactgatccatagtattacgaataatgaagctgctcaagcatttaatacagtgccttacaaacaaatatttaatacacagtagctagtctacttcctcccagtcacaaagcatccagtaaagctttaataaacaaatgagcaagtgaccagcttgaacaagtcacttgaccattctgagcctgtttccctttctgtaaaaagaggataaccacagtatccatcgaggctgccataattacggagataacacgggaaaggacctgacacagcgcagggcacagtacgtgttccatgtggtgactgttatgttcaactcattcacgtgtgcaacaaatacgtagtcagcccctactaggtgacaacactgctccaggcaggtactggggacaaagtggccagcaagacagaaaaagtcaagccccgtcctcacagagctgatattttgcgggaagaatcaaggttatttcaatgagtgaggaacactgtaaagaacagtgaaggtggggtgcctgagacatggggctgcatgggagcgggcaggaaggaatttctgaggaagagacctgagggaagggaggggagagccaggtggcaacctggggacgagggcccctagcaggaacagcaagcagacaggctgcgaaatccaactgtgacttctgaggagcaggggagacagagaggatcagaagtgagatgaagccgaagtgagagtttgggtttccacctaagtaagctgatgagccagctggggtctgagagcaggggtgtgccaagactgatttacatttaacagcgtcactctggctgctgagtgcaagagtggaagcgggaaatgagtgcggtgattcctctttgggggatgaaatgccctggaacgagattgtgaacgtgctaaatgccactcacttgttcactttaaaatagctgatttttgctgggcgtcgtggctcatgcctgtaatccccgcactttgggaggccaaggtgggccaatcacttgaggtcaggagttcaagactggcctggccaacatggcagaaaccccatctctactaaaaatacaaaaattagccaggcatggtggcacgcacctgtaatcccagctattcaaggaggctgaggcacaagaatctcttgagcctgggaggtggaggttgtaatgagccaagattgcgccactgtactccagcctggacaacagagcaaaactcagtctcaaaaaaaaaaaaaaggccaggcacagtgactcacacctgtaatcccaacactttgggaggccaaggcgggcagatcacctgaggtcaggagtttgagaccagcctggccaacattgcaaaaccccttctctactaaaaatacaaaaataagccggatgtggtggcgcatgcctgtaatcccagctacttgggaggctgaggcaggagaatagcttgaacccggaagtcggaggttgcagtgagccgagattgcgccactgcactcaagcctggacaacagttgagcgagactccgtctcaaaacaaacaaacaaacaaaagattaaaaaaaaaagctaattttgttatatgaatttcaatttaactaaaaagaaaaagaagggagccagagagagaccactgaagtcatcaggtaggaggaaagggtggcttgggcctgcatagtggcagaggaagtgattgacaaacggtcagatgctacagatattctcaaagtggagcccacagtccttagtgataatgtagatgtgaagtgtggaagaagcagaggaatcacagatgaccccagggtttccatcttattaagtatttgctggggaatcagtgtgtatgagagagagaaagggtctgggaagcagagggcaggcctctcagtggtggcctccaggccaggccacgagctgaaggctgccaccagtgagaatgctcccggggctccgtgcctcgccccataccatgcctcctcgatgaagccgatgacaaattttcgcacttcgattgacttgtctgcttggaatgcgatgatctcctgccaatgttagagagaaagtggatcagggctacacaaggatccacatcccctttcccctacaccacacccctttctcttctgtcagtcactcacatccaggaagttgtccagtagtgtggggtctttgttgatgatcagctcctggacctggaaggagattgggggtggggaggaggaatacccatataaaacgaggggccaatcaatgcagacaggagagtagaggggaagacagcagagggctaggcagcagatacactcatttcaatgcctggctctgcttctccctaccaagggtgctatgctctgggcatggtctctgaacctcagtttgctcttctataaaatgagactcttaaacatcaactcaaaagggatgttaggaggctacaatgagatcctacaaggcacaggtcctggtagatagtgaggacatgacacaggagggggctgaaaaaaagaggaaagtgccccaaggctcaggccttcctgaggtttggcctccattcacctgtccatcagttctccccactctccttctgcttctgctccctacttcacattgccatgattcagcaaacatcttcacagtgagaacccaattcctgaagcccttgtgcctgccaggctctttggagtaagcccttcccatggacatcctccaataagcaaagagctggcacaggacctggctgctacaactcaagctactattgctaaacggcctcatgaccacccatgggggaggcaccaggtgcatccactccacctcggaggtggggctactccacaaggctacaggctgatgaaggagccgaacgggttctcacacaggaatgctaaccctgccagtctctgaactccaactgcctcctgctctgaaccatgcccagcccaagtgtcccatgtcgtcttctgcctttgcacacacttctgtgccctcagcttgacatgctctccctctcttggctgggcacggtggctcgtgcctgtaatcccagcagtttgcgggggccaaggagggtggaccacttgagctcacgagtttgagaccagcctggtcaacatggtgaaacgcgtctctactaaaaatacaaaaattagccaggcatggtggcaggtgcctgtaatctcagctactcaagaggctgaggcaggagttgcagtgagagccaggatcgtgccatggcactccagcctgggcaacagagcaagactctgcctcaaaaaaaaaaaaaaaagagatgctctgcctctctcatttggtacacttctctccttttatcctccatggcttggttcaaaagtcctccctgactccccatccctaggctgggtcaggagctccctctgggctcccagagcccccctgggctcccttctccatcccagccctgcccacactgggtcatcattgcctggtgacaggaatgtctgccccactggactggacactggcagagaagaaatgcaatgatgaagagtgtaggatttggagctggaatccaggattcaattactagttcagccagctcccagcagagtgaccctgggctaataatttaagccccggggtctgcttctttctgtataaaacagggatgaaactaccctgccttacagagctttcatgagaactagaagagcagaggcctgcactgagcactgtggccggcacacactgagtgtgtaaatgtggacactggtgttactgcaagtgtctttctcaggttcccagcctcctccctttcacctgctcagcccaggatgccccccgggccctcacctgtttgagcactgtgatctttgagtcattggtgatcagcgccgcctggttcagaagatccaccacctggaaggagggggagtggcaggggatagtgccagcccagtccagcccagtgcagccccctcggcactcccagggctctgccacctaaacagggattgccaaagccaggggctatgcttcctcactccaagccctacccgccacgctcaccctctctgaggtggtcatgccatcgatgcccggcccctcctcttgagtgaaaaactgtgatgccacgctccgacgggtgacgctgtctccactgccgctcgccatggctgctgtcagcttgtccccaggaaagaagaggatggatcaagctcagggaaccagcggatgggctgggctggattgtcacccgaacacctacaaagggcccaagcctccttcccaggctgttcctccccagtcaggccttctcaagtccctctcccctccagggtctgtctctggcttatggatatgtgcacggggcctgtaacttgggggagactgacatctcccaaggcagagccagaagtctcagcctcaagtgggccaaccacaaacagctgctgaacgatgggccacatgaacgtgcaacagccaccttgcaggtctccgtgtgtcccctctctccatctgggatatgctttggactgggcaccacagcaaactttcttttttttttttttttgagatgaagtcttgctctgtcacccaggttggagtgtggtggtgcgatctcagctcactgcaacctctgcctcccaggttcaagtgattctcctgcctcagcctcccaagtaactgggattacgggcacatgccaccatgcccagctaatttttgtattttcagtagagacagggtttcaccatgttggccaggctggtgtcaaactcctgacctcaggtgttccacctgcctcggcctcccaaagtgcagggattacaggcgtgaaccacagtgcctggcccagagtaaacttttaaaaacacagctctgaggaatatcaggcacagagtccggcacatagtaggcactcaatacatcacaaaaggcctgcttcaataattatgtttcagccactctctggaatatcatgaagctgtttttaaaagggaggaagggggctttcaggcatccatcacagtcacacaggcaaaattatggaatgattaacgtagcagtatatgtcaattacacaactattcataatagcaaaagactagaagcaactcaagtgttctcaaatagggagactggctgaaaaaaagttcatacataatcaaaggccatggggcttcaacacctgtgaaagtaagtgaaaaacatataaatataaataaaggaaaaagactatggaactgtaacaagaaaggaagaaaaaaacaaaaaaatgagaacaatctctagacactgatagagagtgcatacattaagtgaaaacaagcaaagctgaagacagtgttgactgtatgtttctgttttacaaaaaaaaaagaaaaatgaggccaggtgcagtggctcatgcctgtactcccaacactttgggaggctgaggcaggcagatcgcttgagcctaggagtcggagagcagcctgggcaacatggtgtaaccctatctctacagaaaatataaaaattagctgggcatggtggcgtgcctggtagtcccagctactcagggaggtgaaggcagaggctgtagtgagccaagatcgggccactgccctccagcctgggcagcagagtgagaacttgactcaaaaaaaagaaaggggaaaaaatatatatgttaaaaaaggaaaaaaatctgaaaggataaaccaaaaaccagcagaggaaacagggtaaaaaaaattggtgaagccgggcgcggtggctcacgcctgtaatcccaacactttgggaggccgaaacgggtggatcgtctgaggttaggagtttgagaccagcctggccaacatggtgaaaccccatctctagtaaaaatacaacagttagctgagcctataatcccagctactcaggaggctgaggcagaagaatcgcttgaacccaggaggcggaggttgcagtgagccgagatcatgccactgcactccagtctgggacataaagacagactccatctcaaaaaaaaaaggtgaatctcagtatattatcctgaaaagaggtccctgacagcctgttgcatcagaggacaatacatgcagttcaagccatttttgtcaagtatgtgtttatgtatacgcagaatgacctgaggcaagacatttaacttctctggctctcagtttcctcttctaggaaacagggatagtaacagggcttacctcccaagactattttgaggattaaatgagttagtatatacagtaaacattggctaagtatactattatttttatgtacatgggaaaagatctgaaggctactgcataaactgctaacaacaattatgataattaataataatttggccagctcacgcctgtaatcccaggattttgggaggctaaggtgggaggatcaattgagctcaggaggtggaggatgcagtgagctgtgatccctaccactgcattccagcctgcggacagagcaacaccctgtctcagaaacaaacaggccaggtgcagtggctcacatctgtaatcccagcaccttgggaggctgaggtaggcagaacacctgaggtcaggagttcgagaccagactggccaacatggagaaacactgttccctactaaaaacatacaaattagacaggcatggtggcgcatacctataatcccacctacttgggaggctgaggtgggagaatcacttgaacctgggaggcagaggctgcagtgagctgagatcacgccactgcactccagcctggacgagaatgagactgtcttaaaaacaaaacaaggctgggtgcggtggctcacacgtgtaatcccagcactttgggaggccaaggcggacggatcacggaggtcaggagatcgagaccatcctggctaacaaggtgaaaccccgtctcttctaaaaatacaaaaaaatatgccgggcatggtggcgggcgcctgtattcccagctactcgggaggctgaggcaggagaatggcatgaacccgggaagcggaacttgcagtgagctgagatcacaacactgtactcgagcctgggcgacagagtgagactctgtctcaaaaaaaaaaaaaaaaaaaaaaaaacacacactaaacaaacaaacatgccaaaaaaacaataatctgaggacggtgaaaatgatacttttttctttttttgagatggagtcttgcactgtcgcccaggctggagtgcagtggcgtgatcgtggctcactgcaagctccgcctcctgggttcacaccattctcctgcctcagcctccccagtagctgggactacaggcgcctgccaccacgcccggctaattttttgtatttttagtagagacggggtttcaccatgttagccaggatggtctcgatctcctgacctcgtgatccgcccgccttggcctcccaaagtgctgggattacaggcgtgagccaccgcaaccagccgaaaatacttttttttttttttttttagatggaatttcactcttgtttcccaggctggagtgtaatggcacaatctcagctcaccgcaacctccaccctcccaggttcaagcaattctcctgcctcatctcccaagtagctgggattacaggtatgtgccaccacatccagctaatttttgtatttttagtagagacgaagttttaccatgttggtcaggctggtctcgaactcctgacctcaggtgatctgcccaccttggcctcccaaattgctgggattacaggtgtgagccacagcgcccagccgaaaatgacacgttttttaaaaggaactacccaatagctattcacagtagtatcacatgataggggtctcctcaatgaatgacgagccacagcctcctccctagtttccctgctgcctgtcaccccctatcttgctcagggtcagggccaatgtccccatcaaggcctacaagattttatggcatctggcctgttcttcctctgactgcctctccccctgggctctttgctccacccactctggcctcctcgctgtcctgtgaacatgcccaacatgccccttcctcaaagactttgtgcctctcttccgtctgcctggaatattcctcctcctagatatcagcacaactccttccctcttcatttccttcaggtctccactcacatgtctctgcagtaaggtcttccctgacgactatgtttcttttttttttgagacggagtttccctcttattgcccaggctggagtgcaatggcgtgatctcagctcacagcaacctctgcctcccaagttcaagcgattctcctgcctcagcctccctagtagctgggattacaggcatgtgccaccacgcctggctaattttgtatttttagtagagacggggtttctccatgttggtcaggctgatctcgaactcccgacctcaggtgattcgcccgccttggcctcccaaagtgctgggattacaggcatgagccaccgcgcccggccgacgaccatatttcaaattttaacttcctctcgatccccatctgtgttgctttttctccatagcatttatcatcatcacacactacatatttataagttccacgaggacagtgatttatttatttgaaatcattttttggtagaagcagagtttcgccatgttgcccaggctggtcttgaactcctgcactcaagcaatccaccctccttggcctcccaaagtgcttgggatcacaagtctcagccatcgcccccggcctagaacagggattttgttccttcactttttatattcccagcacggaagagtgcttggcacctagcaggagctcaataaacatctgctgaatgagtgaacactactgccaaacggcctccccaatcactgggttcagtattcctgccctttcactcttgaatcctaatagctatacttgttctactttttccccctttctcactactgcacttgacaagtctttaaaaaaaaaaaaaaaaaagggcatggtgtggtggctcactcctgtaatcccagcactttgggaggccaaagtggacagatcacttgaggccaggagttcaagaccagcctggccaacatggcaaaacccagtctctgctaaaaatacaaaaaaattacttgggcatggagatggatgcctgtaatcccagctacttgggaggctgaggcatgagaattacctgagcctgggaggcagacgttgcagcgagccgagattgcgccactgcactccagcctggatgacagagcaagactctgtctcaaaaataaaacaaaacaaaaacaaagaaaggaaagaaaacaaaaataggacgggtatagtggctcacaattgtaaacccagcattttggtaggtctaggtgggaggatggcttgaggccaggagttcaggactagcctaggcctaaaaactaaaaaagaaggccaggtgcaggggttcatgcctataatcccaacattttgggaggctgaagcaggaagagtacttgaggccaggagtttgaaaccagcctgggcaacacagcgacacaccatctctagacatatgcacaattagctgggcatcgatatcatgccactgctctccagcctgggagacacggtaagactccatctaaaaaaaaaaaaaaaaaaaaaaaaaaattagccaggcatggtgccatgaacctttagtcccagctactctggaggctaaggtgggaggattgtttgagcctggttgtagtgaagtatgattgggccaccgtagtccaacctgggcaacagagcatgaacctgatgaacctgtttccaaaaaaaaaaaagaaaaaataatcagttaatatatattgaacacggccgggcacggtggctcaagcctataatgccagcactttgggaggccaaggcgggtggatcacccgaggttagcagtttgagaccagtctggccaacatggtgaaacctcatctctactaaaaatacaaaaaaattagccaggcatggtggcaggcacatgtaatcctagctactcgggaggctgaggcaggagaatcgcttgaatttgggaggaggaggttgcagtgagccgaggtcacatcattgcactccagcgtgggcaacaagagtgaaactgcgtttcaaattaaaaaaaaaaagaaaaaaaacccacacacacagagagagaaagagaaagagagagagagaacacttaatatgtgctaagcacaattctaagatatacatattaactcatttaaacctcagacaccaaggtttaaatgaattaatatgtatatattagaattaatatacatgagttaggtttacattttttgtttttttgagacagggtgtcactctgttgcccaagctggagtgcagtgccgcaatctcagctcaccgcaatctctgcctcccgggctcaggcgatcctcctacctcattttcccaagtagctgagactacaggcgaatccccatttaatttttgtactttctgtagagaagggtttcgccatgttgcccaggctgggagttagtatttttaattttcattttacagatgaggaaactgaagaccagggaggtaaagtgacctgaccaaaggcatatagcttgtaagaggcagagtcagcagcatggctgcatatcttccttaccactatgctacagtactgtttatctgaaaggaattgttttttacccccaggtctgtttacgtaagccaaggatcctggccaccagacaaccggcatggcatgccgtccccagtcaaaacataaaaaaaacaggccgggcatggtggctcacacctgtaatcccaacaccactgcactccagcctgggcgacagaatgagactctgcctcaaaaaataaaataaaataaaataaaaccccataataaacatttccacttttttcatgataatacattcagatcaaccaaaatattttaccctgtttcattcttcttctgctttttggtttatgctttcagttttgttttgttcttttttaaacacacatacacaaaattctcctgcaggagctagattttatgcaaaaaaaggaaaaaaaatgaaaataaaaaaacccatatatacatatttccctttcatttacaaaaagagcatacacagggccgggagcggtgactcacgcctgtaatcccagcacttcgggaggcggaggcaggtggatcacgaggtcaggagttcaagaccagcctgaccaacatggtgaaaccccatctctactaaaaatacaaaaattagccaggcgtggtggtgtgcctgtaatcccagctacctgggaggctgaggcaggcgaattgcttgaacctggaaggcagaggttgcagtgagccgagatcacgccactgcactccagcctgggtgacagagtgagactctgtctcaaaaaaaaaaaaaaggagcctacacaggccgagtttggtggctcaggcctgtaatccctgcactttggaaggctgaggtgggcagatcacttgaggtcaggagttcaagaccagcctggccaacacagagaaaccccgtctctactaaaaatataaaaattacctgggtgtggtggggcacgtttgtaatcccagctactcgagaggctggggtgggagaatcacttgaaccagggaggtggaggttgcagtgaactgggatcgtgccagcctgggcgacagagtgagaccctgtctcaaaaaaaaaaaaaaagaaaaagcatatacaataaacaccaacctccacttcacttgttttcccttaatatatgttggaggccactatatcagtgtatagagattttcatcatttccttttatctacctcattcctttttagagttgcatagtattttttatgtggatgtattatagtttctttcagccaatcttcttatttaagaacatttgggatgcgtgtagccttttgctatgatgaacagtatcactgtttccccttccctctcgatgtactcgttaagaagtggtaccctgccccactgctacctaggaatctgatgactaccctgtttccccaaactggctctaggagtatcttttattccttcaacgaacattagctgggcgtctccggcgtgattggcgctgtgctgagaacacagtggcgacagagacaaacctagtccctaccttcatggaacacacggtcatagacatcataaaacagcacacagataagagtcggataacaaattagaccacacgtgacatgaaggaacacggaccgacaaaagcatttaacaggcggatttctggatggagggcagggaaggagggcttcgcagaggaagtgacgttggtgccgagacccgaaggatgaaatgggagttagccaagccgaatgggtaaaaggatgttgcaggcagaagggacagcctgtgcaaaatccccgaagcgggaaagcgcatggcaagtttaaggaaccgaaaggccagggcggctgttagaggtgggggaaaaagcaaagaggccgagtcgaagcaagcgaggtctgcggggcggtggcgcccggggggccacgttggaactttgcctcgagggcactagggagccaaggaagggtcctgagcaagggaagaaacatgggtcgcgaaagccactgttcccctctccccacggcgatgccctccccgcccgagcccctgcttctttaggagcctcctcctttcgtctccgggcccaaacgccgcctcccgctcaccgcagctctggcctccgttcccctcgcgccccctcagcagtgcctcttcctacactccgccgccgccgccgccgccatcttccgttcgtcgccgggaacggtgcgcacgcgccacacacccagggccgccgggaaatggagtccagagcacagcccgaccccgcccatgcctcgtcccgtgcgagcggcattctgcccgcctccatactacggcgagcagacccttcatttccggctctgggtccggctaggccttctgggaaatgtagtcccttcggaggcaccgggcggaaagggagctagagcattctgggaaatggagttctcagtggtgctgagtccctggacggctggctggtcttggagagtgcggagttcgggcagcgaagctcctgggtcttggaggggaggtggtctgttgccctagtggggtctgcggagaggccccgatcccctccatctttgttcttgaccctttcaacagtctgaagcatttctttttcttttcttttctttctttctttttttttggaaacggagtcccgctctctctcccaggctggactgcagtggcgcgatctcggctcactgcaacctccgcttcctaggttcaaacgattctcctgcctcagcctcccgaatagctgggataacaggcacgcaccatcacgcctagctagttgttgtatttttaatagagatggggtttcaccctgttggccaggctggtctcaaactcctgacctcaagtgattcgtccgcccgcctcggcctcctgcagtgctggaattacaggcgtgagccaccgcgcccggccaagttaagcatttctagccgtcggaagcctcagtcttcctgtctgtccaatggggatgtgatttcggggaccttttacgggtccttgtagtcgcatagtggccctagcgttctgattcccctttcttccgccacggtcatgcagggctctggctcttcgtcctctcctgccgagatgatgaagccccctgaggtagaaaggctccagagttctgacctcggggcccttggtatctgcagcgtcgctgcgggcagctccctcactcctgaatcacccccagctgtcgcgtcctggggctgcggcccccggcgcctgaggtctgtctcctggcgatcccgcagggggcgccccagtccgagcgcgccgccctcggggaggcgggaggggagcccggggcgggcgagggcgggggtgtcccggctataaagcgtggccgcctcccgcggcgctcgggacagccgtaccccgggcggtcggacgggcgggcgccggtgggagctcgggccgtgcccgctgagagatccagagcgctccgttcccccggggccggagcgggggcgggtgggggcgtaagcccgggggatgctgggctcagtgaagatggaggcccatgacctggccgagtggagctactacccggaggcgggcgaggtgtgtcctcggggatggcggagcgggaagttgggggcaggtatcggggtgtgggctcacatggagcagggactggttgtgggttcaaatggaggcaaaggcgtctacttgggcagctgaggaactgggaacacggagaccaggtgtggaagtcggggaccggggacgaggcatggatgggagcgctgtttgggcagcctcgccgcggccagggcttaaaaatggaagtcaggaaaatttagccaagggtcgggtcacaccttaaacttgggagccgggtgttggagccccaaaaagcaagggatttatatgtacaaaccaaagataggaatcagagttccagggtaggggacagactagggggtttcaggatgtgaggttcaaagttggagggaaagaaagactaaaagatggaggaggagtcaccattaaggggaagactgaggtgggagctcagggccagcacacagtgttaaagaaccggggttcggggctaaggatcagctggtaatctaaggtagggtcagacatagggattggtgctcaggggtcagagatgggggtgctcagagatgaagcttcgtttttggagtctgaaataacaggtggcttagagttgggcatctgggagcagaagatgtagccatcagcattggcaggagaggggccgatctccacccccccatccctacccatgaccctccgcagggactccccaagtcggaagatggagagttttagattgtgcaccttcccctgctccccgccagtccagcaacctccagctattgctaaaattcccatccagtctcacctcagacaaggcttccctggagtggggggtggcggcatattctaatcccctcacctggacagacagaaagtccttcctcaagtctgacccccattcgtcttgctgcaacgacccctacaccttagctacctcactctgtaatcaacgttgtgaggttgttggggctgggggttgggttcttggtctgagaattatgggggtctggacacttggacttctaacctggaaggggactgtgggcttgaggtggggtgtggggcaggaatggctaggttctccaaggagtcaagatctggtgactgcgggggccccagtgtgcctgagtcttgggtctggggctcgaaactgtagggtgggactcctggatccccaggccttcagggctgggcaaggtgcctgggaagggccagtcctgggtttggggaggtgtgaggtgcacgtggggtggggcagggccaacagggaaagggactgggagtgttgagaggtggaggcagggtggctggaggtatcagttgtgagatgcggaaggcagagacccaggtgggaaatggagggttccaggtagtgggggtgatcccagctggacctctgcagaactcagtctggggacctgatttaagggaaccacctacagaccaattgtacaaaccaactacagttgttttgggggcacatcttaagtaaatgatgggggtctaggcaggaggagttgatatttggggcacagtctgaatagatccaagtttaggggacaatttgtatggaaattgtgtcagaaattgaaggaaagccggcacagtggctcacacttgtaatcccagcactttgggaggtcgaagtgggaggatctcttgagcccaggagtttgaggccagcctgggcaacatagggagaccttgtctttaaaaaaaaaatttttttttaattagtcaggcatgcctgtagtctaagctacttggttgggaggctgaggtgggaggatcacttgaggctgggagttcgagctgccgggagctgtgatcgtatcacggcactccagcctgggtgacagaatgagaccctatctcaaaaaataataatagtagagggacagtctggaggtaatcagcatttcagggcatattttgggagagtcagtatttggaggaatggaaatggttgggtgatactgtctgaggctctccccagccttcccatcagataagcccacctcttccccttgggtcagaacaatggggagagaaatacctacactcagccagcaactgagagctgagagggtccccaaaccacttcttgcccatagcaccctcccgcttggggtgacgttaacactcagggcagcttgctgtctggaaagaacttggaaagttaccatcctgggatatccctgttggcctcaggttcttgcagatcagctggtccagctgctcccctgttttagaggtggttaactctgaagccccgcacgcagaacactggggtcctgggttgggtctgggactagaaacttggcttctggcttcacactgccttcctctgctccctgtcacacccttctccagagacaataaggaaatgaaagaggagaaattccagtctcctggtgtgggggtgcgggtcccccaagggcttccccccaatctcagccccaccctgtcaggggagatccggctcagacccggacaccaggggttcatcccagccccggggcgtgggaaagcctagggtggattagggcagctggagtgcttgaggtcggacctcaaggaggacttccgggtgggtggggagccagaaaggagggccctggggtccctgtctgtcttactctgcaataccagagagcctgactgggttgcagaaatggggggtggaggtatagggggatttggaaactctgtggacccctctaatccatcaccttctcacctcatcccttttctttttctggggaggggacccgaagccaccaaccagcgggagagcctgcatgggggaagggagtaactgtggctgcaatttcactgtaagacttggggtgagggggaatggatttgttgaagggagggagatagatagatagatagatagatagatagatagatagatagatgcatggatggatggatagatagattgataggaagatggtggctcgtcatggtagctcatgactgtaatcccagcactttgggaggccgaagagggtggatcacttgaggtcaggagttcaagaccaggctggccaacatggtgaaaccccatctctactaaaaatacaaaacttagctgggcatggtggtgcatgcctataatcccagttacttgggaggctgagacaggagaattgcttgaacccaggaggcggaggttgcagtgagccgagatggagccactgcactccagcctgggtgacagagtgagactctatctcaaaaaaaaaaaaaaaaaaagacaagaagatgggctgaaggaggaagaaaggtgggagttggggttgggaggggagtggggtagagtcggatagtgagagagagtgcccaggaagggagaaagagatggaaggatggagagagagacaggggccgagatggaggggaaagaaagatgggagaggactcgggaggggtcgagggtgggcaggaagagcaaaagaggttagggtggagacagaagggaaaacaatgcgggggtggggagggagatgggagaggggaatatgggtactagtactgagacgggtaacacaacggcaaaaatagccaacagagattcaaagagacatgatgaaagagttccttggagagacatgaaaaggaaagagcagaggatttctcgactggaactcagacttagggttgagttggttgcctccactctctgattccctaagccaccctggccagactcgtttctccggaccttgtgacctgcagaagcttacagtggtagggccagacatggtggctcatggctataatcccaacactttgggaggccgaggcaggaggatcacctgaggtcaggagttcgagactagcctgaccaacatggtgaaaccctgtctttactaaaaatacaaaaactagctgagtgttgtggtgcgtgcccgtaatcccagctgctcgggaggctgaggcaggagaatcgcttgaacctgggaggcagaagttgcagtgagctgagattgcaccactgcactccagcctgggcgatacagtgagactctcttaaaaaaaaaaaaaaaaaaaagcttacagtggcaggagactaggcggtatccagttaactcacatttggtggctctagccagtgctgtatatagcagcattcccccacccacgcagtgccatgagaccccaggcctcggaggaggcagtggggaaaggtccaggtggagaatggggcagagaggatgggagacagtggttgagaagggataagtagatacaaagaaagaaacaaccttccagcatgcctatgttttcctggcgtgttctgttcactgttgtgttcctgctagactgttggcaccacgagggcaggcatttctgtctgtcttagtcactgcttttattttattttatgattattattttttgagatggagtcttgctctgttgcccaggctggaggcagtggcacgatcttggctcaccacaacctctgcctcctgggttcaagcaattctcctgcctcagcctccctagtagctgggattgcaggcatgtgccaccatgcccggctaattttgtatttttagtggagacggggtttctccctgttggtcaggctggtctcgaactcccgacctcaagcgatccgcacccccaccccccccacctcagcctcccaaagtgctgggattacaggcgtgagccaccgcaactggcctagtcactgcgtttatagcgtgacccggaacaggtctggagccagactgcctggttgcagaatcccagttctgcccccattcttgctgtgtgaccccagcaacctctctgggcctcagctagctcagctgtaaaatgggcatcatcataacacctcctcccatagtatggttgtcaagattaaaggagaccattcttgtgaagtgcttggagcagctaactgataaatattggttgaatgaatgaaagaatatacagagggttacttaggaggcactgcaagatctaccgtgttccattgacctaggatgcaccttttccccccatttgaacatttccaaaaatgggatgcattttacagtcaacagtgtcctatgattttaactgagtgtttttcccatttgtattaatatataaagtaatgctgcagcttccagagaagtcttagatttgaagatatatagtaaatggataatattattaggttgaaaagtgatttctgatattcaaacacttttatgtataaatacagtaatttatttttatttatttattttttttttttgagacagagtcttgctctgtcgcccaggctggagggcagtggtgcaatctcggctcactgcaacctccaccttctgggtgcaagcaattctcctgcctcagcctcctgaatagctgggactacaggcgcccgccaccatacctggctattttttgtgtttttagtagagacagggttttgccatgttggccaggctggtctcgaactcctgacctcaagtgatccacctgcctcggcctcccaaagtgctgggattacaggtgtgagccactgtgcccagcctaaatgcagtaattttataagctaaaagattgaagagagctacacatatatgttagatatgttagattattacagagttataataactttttttttttttttttgagacagaatctcactgtcgcccaggctggagtgcagtggcatgatctcagctcactgcaagctccaccttccgggttcacgccattctcctgcctcagcctcccaagtagctgggactacaggcgttcgccaccacacccggctaattttgtttttgtatttttagtagagacagggtttcaccgtgttagccaagatggtctcgatctcctgaccttgtgatccacctgcctcggcctcccaaagtgctgggattacaggtgtgagccaccgtgcccggcctataataactctttatgattactaaaattgagaactgctgatttacctaataaaccagcagttattaaatgttttggtctcaggaccaccccccttcttttttttttttttttgagatggagtcttgctctgttgtcctggctggagtgtgcagtggcatgatctcagctcaccgcagcctcagactcctgggctcaagcgatcctcctgcctcaacctcccgagtagctgggattacagtcctgtgccacgatgccggctgatttttgtatttttggtagataacagggttttgccacgttgccaggctggtcttgaacttctgacctcaagtgattcaccctccttggctcccaaagttctgggattactttgggaggctgaggcaggaggattactcgaggccaggagtttgaaaacagcctgggcaacatggtgaatccccgtctctactaaaaatacaaaaaaattagctgggtgtgcggtgcatgcctataatcccagctacttgggaggctgaggcaggaggatcacttgagccccagagtttgaggctacagtgagctgcgattgcaccactgcacttcagcctgagtgacagagtgagaccctgtagaaaaaaaaaattatttaggagtccaaacagtttctgttgatgtgggttatgtctatctacgtttacagtatttacaattaaaactgagaaatattacaaacatgtattcatttaaaaatagcaatcatttgttagtgtaaaagatttttattaaaaaaaccaaatttcaaaaaatttagtcaaaagagcgacactgtttttttccatttttgcaaatcaagtctggcccagtggaagacagctggattctcctggttgcttcttcattctctctgttggaatatcaacaccccctggaaaactccactgtacacttcatgagaaagagagtgaaaagggctaataataacttaggattgcgggtgtggtggctcatgcctgtaatctcagcactttgggaggccgaggcgggcagatcacgaggtcaggagttcaagaccagcccggccaacatggagaaaccctgtctctactaaaaatacaaaaaaaaaaaaaaaaaagctggcgtggtggcacacacctgtaatcccagctgctctggaggctgatgcaggagaattggttgagcccaggaggcggaggttgcattgaggtgagatcacgccactgcactccagcctgggcgacagagcaagactctgcctcgaaaaaaaaaatagcattattttgaaaatagttttgacttcgtggacatcctcaaagggtttcagagactgccctgggagtcccgaaccctggagaatcacttaaaggatgatgttgagtgtatgggagcatggtgggtgggaaagcagggggcagaaagggcgtgtccagggagtgaggagagaccttgagagactgctttctacagatagaggtaatgatggaagggatttgtagagaaggcaagatggacagacagacggacactcagtgggtcctgggatcctttgctgaccagcagagtggagccccactgacccctcctttcatctttcccctaggtctactcgccggtgaccccagtgcccaccatggcccccctcaactcctacatgaccctgaatcctctaagctctccctatccccctggggggctccctgcctccccactgccctcaggacccctggcacccccagcacctgcagcccccctggggcccactttcccaggcctgggtgtcagcggtggcagcagcagctccgggtacggggccccgggtcctgggctggtgcacgggaaggagatgccgaaggggtatcggcggcccctggcacacgccaagccaccgtattcctatatctcactcatcaccatggccatccagcaggcgccgggcaagatgctgaccttgagtgaaatctaccagtggatcatggacctcttcccttactaccgggagaatcagcagcgctggcagaactccattcgccactcgctgtctttcaacgactgcttcgtcaaggtggcgcgttccccagacaagcctggcaagggctcctactgggccctacaccccagctcagggaacatgtttgagaatggctgctacctgcgccgccagaaacgcttcaagctggaggagaaggtgaaaaaagggggcagcggggctgccaccaccaccaggaacgggacagggtctgctgcctcgaccaccacccccgcggccacagtcacctccccgccccagcccccgcctccagcccctgagcctgaggcccagggcggggaagatgtgggggctctggactgtggctcacccgcttcctccacaccctatttcactggcctggagctcccaggggagctgaagctggacgcgccctacaacttcaaccaccctttctccatcaacaacctaatgtcagaacagacaccagcacctcccaaactggacgtggggtttgggggctacggggctgaaggtggggagcctggagtctactaccagggcctctattcccgctctttgcttaatgcatcctagcaggggttgggaacatggtggtgggtatggctggagctcacaccacgaagctcttggggcctgatccttctggtgacacttcacttgtcccattggttaacatctgggtgggtctattacttactgtgatgactgctgtctcagtgggcatggtgttgatccacggggtactgtgataaccaccatggatacattttggtggcccactgggtactgtgaggactgctacattgatggatgttattggctaatccactgcatggtttgatggccaccatctcggttggccctttgggtgtgatggtgatagcatttcagtgacatcttctttggccccccccattaggtgctgtgcccacttcttttttggtgtacttggcacagtaggtgccaagttggccaccattctgtgtaacaccttttttggcccattgggtgctttgatggacatcatactgggtaggtgacaacgtcagtgggccaccatgtgccatgatggctgctgcagccccgtgttggccatgtcgtcaccattctctctggcatgggttgggtaggggatggaggtgagaatactccttggttttctctgaagcccaccctttcccccaactctggtccaggagaaaccagaaaaggctggttagggtgtggggaatttctactgaagtctgattctttcccgggaagcggggtactggctgtgtttaatcattaaaggtaccgtgtccgcctcttactgaatgtctcttttccttggccagtgggccctgtggggcttgaacacctgaatttctgctcctctgtcccttctgcttcctgcccctaagagctggctgcctctgggggaggagttgggggaggcatcgacctgacctttggctctttgctgtccctgaccccaaggacagtttgctcacagatagcagcccccgcagcagtggggccagagcagcagggggaggtggctctgcagtgaccaaggccatctccccacccccacttctcagacatacacacagacctctacctctgaggctctgcaagcctaatggccgaataatctttggctaagctggggaggaggaaaaaggacagatgaggtgtcaattcaatgactggagatcgtgcacatgttggagtttatctgcgtgtgtgtgtgtgtgtgtgtgtgtgtgtgtgtgtcctctgtgtgtcataggatagcactatgcctattggggtcctcatggtctaccgcagggtgttgtctgttgtcagtatcccttgattgtgtaggtttttgtgtctgttcataccctgggtatatgcttacttgccctgggtggctgggaatatcagactcttgtgtatgtttttttttgtttttttgagacagggtctcgctctgttgcccaggctggagtgtgtggcacaatcttggctcacggcaacctccacctcctgggttcaagtaattctcttgcctcagcctcctgagtagctaggattacaggtgcccgccacgacacctggctaatttttgtatttttagtagagacagggtttcaccatgttgaccaagctggtctcaaattcctgacctcaagtgatccgcccacctcaggctcccaaagtgctgggtttacaggcgtgagccactgtgccctgccttttgtgtatgtctttattgtgttgtgtgtgtggttctctgtgtacacttatccctgggtctctctgggtctcacactgtgttacgtgtgtgtctatatgccattctctacctaactcactgcctcagagagtgcgtgtgtggaacgagatgcatatggcagggctggctgttcttgtgtgttctatgtgtgtctctgtgagtccgtgtatgtctgcatgcttaaaagaaaacatgtagtctgggtgtggcggcttatgcctgtaaccccagcactttgggaggtcgaggtgggcggatcacttgaggtcaggagttcgagaccagcctggccaacatggcgaagttggcctaaaaatactctattaaaacacaataattaagccgggcatggtggctcacacctgtagtcccagctactcaggaggctgaggcaggagaattgcttgaacccaggaggcagaggttgcaatgagccgaaggttgcagtgagccgagattgcactgctgcactccagcctgggcgacagagcaagactgtctcaaagaaaaaaaaaaaaagaagaaagcatgtgtgtttgtgtgtgtctggtggctacctttgctgtgtacttgtcactgttgcatttgcatctgaacgtgtgtggagagtaggctggcctggtgtctgtcacttttgcaggagagtgtgcggggaaggaaccgtgtcctccttcagccactgtgagcctctgggtttgggatctgtgtttctgtcccccaggtctctcctgtgactctgagtctgcctgtctgttgctcagattggctgtcccagaaacacaactgtgcacctcccacctctcctttcagaatggaaactgaggcccagatgggatgggactgggctaaggtcattcagcggggctggagtgagtgggcaaggttgatctgattctgtcttttccttacctgtcatctgcctttcctggttgctggctctctggttgctcattcatttattcagtcagccagccagccattcagtcatttgaagaccaaagactttgtctaatccacgtgtgtgtgtgtgtgtgtgtgtgtgtgtgtgtgtgtatgagcgcacacgtgcatgcatgcacaccagtgtgacgtgtctttcagtttctgtgggtccatctttttccttgtctcttagtgtccttttttcctctttttctttccctccctcccttccttccttcttccctcttttcttttcttttctttttttttttttttttgacagggtcttgctctatcacccatgctggagtgcagtggcgcaatcacagctcactgcagcgtcgacctcctgggctcaagctatcctccctcctcagcctctcgagtagctaggactacaggtatgcacccccacgcctggctaattttttaatgttttatagagaaggggtctccctgtgttgcccatgctattcttgaactcctggcctcaagcaatcctcccgcctcagcctcccaaagtgctgagattatagacatgagccactgcgcctgaccagtgtcatttctttctgtatcaatctgtccctcaccctctttctgtgcctttatctgtgtttcttggtttgagttgctggtgctgtctgtgtgtgtctgtctctcctatggctcacctcatgctctctctctctctcccccctcgctcacccggcccccgccttttctctctactgctctgacttccctcctccctccacctgggtctctgggtttctccctccttctctcagagtgactctttcctggggtccgtctccccccactcctttcctggatctctggtctctctttctctggcctccatccctctcccagctctctgggtttccgcctctacctgccacctcgcaggccaggccctctattcctgtcgctgcgccccgccttgccggctgcgtgtcacccccgccccctgccgcgctggctccccgtccgtcccaccagccttgctgtcctgggcaggccggggaattcctcccggttcctggaaaaaacaactggggccgagagaaaggccctcagtctccccaggcacccgcccccctccctcgggcctgggggtctctcccggagtcggccagcccgaggcaggaagccctgcggtttctggcttctcccaggcggcctccggatctggcccccgccccccggccaacagcccaaatattattccgcgggaggagtcggtggtggcgggaggaggcccaggctgaaagaggctttcagggcggccaggcctggggcttcctgtccccaggctcgggcctcaggccgccccagtggggacctcaggtggccggaggggcggggtgttgttgtagggtcctcgggggagggtggggccatccgtcggggtgtctggtggccaccagctctgctggcgtgggcaggtgtgacccccaccccagggacagccggctgatgtccagcgtggaaaagtaccacggtcagacatgggacgcatggacagacacgggacgccacgaatcagggatgtggggtggccatggggacacaggcggccctgggctgtgggcctaaggtgacatggtccaggggaggggcctgtgggttggagcagaggccggggcagggtcgcagctgtgggcagagggctgtcagcattaggaggtaccagatgatgatgatgatgatggtgatgatggtgatgatgataattaaaagatcctagggcttcccatgagtcagggattgtgttagcaccttacagaactgatgggctccatctctcccgctccccccaactttactgttgaatgaaactgaggcacagagaggtgaagtaacttgcacagataatgagtggggtgctagggcatgaacccaggcagtctgggcccagagtcagtgcctctaagcaccccgctgttctgcaggatgggagggatagcggcagtgcagcacagtcctggggtcccaagccctccctggcaggcaccccccctctctgccacagcctgccatatggcaggaggtgggttcccagaagccacatactcactggtgaccaggcggttcacagctaggtaggacatgtgtgtctaagcggtttgtcattgggctttattcgcgtgtcttgctgtcagcgtctcaatgtcactgtgtctgtgggctcgtgtgttactccatggtgtgtctctgttgagcgcatgagtgtgtgtgcctggacacctctatgttggtgtccattgctgggtttgtgttggtgtcactgactgtctcaccgtgtacacgtgtaggtgactgttctgtcattgtcttctttgtggctgtcaccatgttctctatgtctgttcatcgctgtgtgctttgtcactatgcctctgtgcctgacaacacatttgcctgtcattgtgttttctgtgagcatgcatcagtgtgtctgtcaccgtgtctgtgacagtgtgtctctgtgactgtttacgtctctgtcactctggacctgtcactgtggctctgtctatatctgtcactgtgtgtcaccgtgtctgtccctctatgtgtcaccatctacccaggtgtcaccatgcatgtgttactcatcgcccaggccacaggtgggtgtgtcgggcccactggtgccagggctgtggcccagcccctcccacccttgctgaccgtgggccaggctgggcgcctatttgcaatcctgccccaggtaaacaccaagatccggaacccaagggccacctccctcacctctgctcctgcccctcagcctgttctgggctggaccagagccctgcagacagtgtgccccagactggaaatgggccctgagcctccccctaaccctgggcaccagcctccccaagccttcagcctcaactctctgtctgtctgtctgcttctctctctctctcactgcatgtcgatttctctgtttctttttgtgcctgcttcctctcacctgggcttctctatggctctgcctctctctggaatgacgcttgtcttcattctgtcactgtccctctttctgtggctctttctgtctctctgcagataggttccatttctctggatgttcagctgatgtgtctccatttgagtccgcctgcttcgtgacacttgctttctatctaatgctggcactgtctccgtaagtctgtttctgtcccactttgtaagtttctcccccaccttctctctgtccaccgtctctctgtctactctgagcctcttagtcttgggcactatctctgtgggtctctgagtccccagcccccacaggggcagactgccatgcctggacccttaggggagtgtgtagcccccagtctcccccagccagtgtgctggtgtgtgtgtgtgtgtgtgtatacacacacacacatatatataaatgtatatgtgcatattatttatatctgtacccaggcaggaggggaagacactggggcctttgtgtagccgctgccctcctgcccgccactcttctcccttcgtccctgccgcccgcccacctccactccccctgcacagaaaggttcctgtggggcctgccagcttcctctgcctgaggtgtgagtgggcacgccacgggtgaggcaggcaggagggcctgggggatttttccagccccaggaagctttccgggtggggagggttctggaaggaatgggagttctcagcagggctgctgtgggtctgtgtggatctgctgtccctgagtgtccccgggccctgagctggcctctccctgggggtctctgagcctgttcgtccatctagttgccattctgacgttttctctgttggtttggggtctcactcacacatgcacacacagtcatcgggcatttgtgttgggctccgtgttgagaacacacagataaatgtcggtcccagcgggttctatgccgtttctgtctcatttgctccatccctttaccctctgcttgaaagctcccaccttttcctattaaaacaaaattcaggccaggtgcagtggctcacgcctgcaatcccagcactttgggaggccaaggcgggcggatcacttgaggtcaggagttcgagaccagcctggccaacatggtgaaatcccgtctctactaaaaatacaaaaattaaccgggtgtgatggtgggcgcctgtaatcccagctactcagaaggctgaatcaggagaatggcttgaaccctggaggtggaggttgcagtgagctgaggtcgtgccactgcactccagcctgggtgacagagagcaagactctgtctcaaaaaatataaaaaacaaaattcaaagtccttatcacagtgtacaggtcctcttactgctcccccaccatccctctgattcaatttcctactactgtcccccagcactggtcacctggttgcttctgggacaaaccaagcaggctcccacctcaggacctttgcaggtgctatttacacagatttctgctggcttactccctcccctccttcagttcttagtgtcacgtgctcagtgagctcttccctacatccctttctaaaatagcaaccccaactggacacggtatctcatgcctgtaatcccagcactttgggaggctgaagcaggcagatcacatgaggtcaggagtttgagatcagcctggccaacatggtcaaaccccatctctactaaagatacaaaaattagccaggcatggtggtgcgtgcctctagtcccagctacccgggaggctgaggcaggagaattgcttgaacccgggaggtggaggctgcagtgagctgggatcgcaccactgcactccagcctgggcgacagagcgaggctctgtctcaaaataaataaataataaaataaaatagcaaccccggctgggtgcggtggctcacacctgtaatcccagcactttgggaggctgaggcgggcagatcgtttgagctcaggagtttgagaccagcctggccaatatggtgaaaccccatctctattaagataaaaaaaaagaaagtaaaatagaaacccccatcactctttatcccctttccctggtttattttttcttcttaggactgaccattctaagtgtctttttttttttttttttttttttgagacagagtcttgctctgtcaccaggctggagtgcagtggcatgatctccgctcactgcaacctctgcctcccgggttcaagtgattcccctgcctcagcctcccaagtagctggaactacaggcgtgtgccaccacgcttggctaattgtttgtattttggtagagacgagatttcaccgtgttggccaggatggtcttgatctcctgacctcgtgatctgcccgccttggcctcccaaagtgctgggattacaggcgtgagccactgcgcccggctggctgtcacattttatggtcctgtttccatctcttacctgaatgccagctccatgagagcaggggctggattctgtttcctgctccatccacattatctcccccagtgcttgtcacatggtggatgctgaataaacacttgttgaggaagagaagcagtccattaatctatccatcccttaagctgaccctgtgctgggtgatgctggggacgcagtggtgatcaagacagccctggccttgcccttttggggctcacagtctgcttgccagacagcaacactccagaatggacagggctgggattgggggagcacagagggatatgtggggtgcagaaatggcagctgatgcagcctgggggtcaggcttcttggaggaggtgccttgactggggactaaatgacccaaacagatccaaccttgcacttcctccagttccctgcctgtctcacagaactttcgagtttgatgatgtcatcactctagttcacacctgtgccttttcctgatttcagtctttctcatctctcctttttttttcatctctttattgccttctctctgcatctcagtctcccctcttttgcatctctgttgttggcagctcatccgtacatctcagtctcgctcaacccatcagaatattgtccatttccttttcttttctgtctctccttctctgtgtctgcctcatctctgaggctctctggagtctctccctgtctcactgggtctccggcttctgcgtctccttgtctcgttcagtgagctggtctctgcatctctccctccccacctctgttgtctcccatcattccctgagtgtctctctgcgtttcccctatctccaagtctctctacctgcttcctgattcccaaataaatccagaacccctccaccctggccccaccctggcactgggggaaggggggctgatccagcccccacacccacacaggtcaggccttctgctctgttaatggttaactcaacctctatctagaatacacaccagccaggctgggggtgactcccctgccccccacccacctaccagctgttcttaaaggaccaggtgtcctccacagcaatttagctcccgctgggacataggagccaggtgtctggaggcctccagctgtaaagatttgggggtgggggagatacccggcacttgggtctgcagagctgggtcaggggaagccacaggcttgcctgggaggggagcccaggcacaggagctccatccaggtctctcttgccccaggcttatcacctggtgtatttaatcaggggtggttttcccagccctgccctgagcccaggctggcagtgccaggggtggcagaacacctgagagctgacggctggggggtggggaaggatgggacccctcagtccaagaacagagggtcctccagatgcgaaggttgaagccctaggatccctaatatctgggagttaggacatgtaggtatgcaagtatgggtgggacccctgggtaaccgagctgatgggtcaggactttaggggcctccagattcaggtgatgggaaccctgggttcccgaggacatctgggggcaaacttggatcccagagctgtctgacagtgctgggtggtggttggacaatcattccctatctctctgtccatccgcgggcctctgagccccgcattcccccttcccggaatctccaccttagcttggccggggaggccgcaggggtgggggctgggctcttggggccgccccctccccttaacccctgctttgccgcagcccgctcaggccccgccccgtgacgccagcgagcaggaagtcctggttaatgatcagccacccggacaggtgcgggacaaggccgcgcacatcagaagcagccgcggagcgagtgcctttcactctgctctctagggtggccgccaaaggggcttgtctcccaagacgagggtgaggaatccagctggggcttcccaaacgtccgcctctggggcaccgccagaggcaagaagtagccaagttgtttctaggcatcctgttagtttaccccgtggaggtaaatttcctctttcctcgggcagtccctctagcagtctaccctaaattctcccttctacccggcaagaacccactgcccatgtcttctaggaagcctcccgctgcctctttcccctccccacgtaggcgctgagtcctccaccttccaggtagagataggggatgggtcagctacagaagggtaatctactcccaagcctgtctgtggctcccctgcaggagccatcccctctctgagcctcagtacttttatctggaaaacgggccgatggctgaaacgtgaccagtgggtcgcacttgttgaaggtcggccggcgggaccgcctgggtgcagggcgccacctggaggctaccgcgcaacgtcctcgccctcgcaggaccagttcagtcccaaagggggcgcagcatctcacacaactaagggaccaagaaggaaaaaaaaaacccatctttcggtttattgaaggagcagaagggagcggggggtgggggggtgggaattaaatgcttttgcctcgtttataaagagcgagttttcaggaggtcccttctcaaggaggaggggggcacctctcccccaactacaagcagcagcaaagccaagccaaggaggacagagggaaactggaggggccaagggaccccaaacaccccctcggacaggagccacaagctttctccccccacccacaatgcatctaccccaggggacccatctgggtggaagaagggagtatgtacacagatagaggtggcactgggctgggtcggggagggaataatttatccgcggcagcggtgggtggcaaaggggcagagggcagtagcctggaggcagtggtagcctaggggtcccgttctttcttaactttgatgtctccagcaaggatggtggcgatctcgccctgcatgaaggcccagggcacggaggagccgaccagcgggcacttgtctccgctcgggcagtacacctccccggccgggccctgcgccttgatgaactcccgggagcagggaaagcagaacttgtgtccgggcaccgaggggcactggacgaagtgggtgtcttctagccgctccctgcacagggtacagcacaggggggccccaggggtcgccccagtgccgctgccacccccgctgacagcttcggcccccgctgtgggactgacttctgcttcgccgttgcgggccacaaggcgatgctgggttggcggctgggccgtggaggaggctgcagggctggcgccccctgcacgcacaggccccccgcctccgccagggtccttgggtgagtggcccagggcttcggccacattcttcagggcggcaatgggcgagggcacaccaggggtctcagcggagtacgggccgccgggtgccacccagtgccgttgctgctgctcctcggtggtcatcttcccagccgcctcgccctccggctcgggggatgccttgcgacggcgcggcgtgggcgccaggttccgggatggggctcgcgggggtgggccacagagagccgcaggggccggctctgggtactgctggggcagggcctccgcgggagctggctcgcggaagctgcggacgccgtcggtaagcagctcgcccagctgccgccattctcctgatccatgccggcgttcatattcgaggtacttgaagcccgaagaagccagtgccttgcccggctcccgcagagcatcgtggaacatctggcgagccactgccaggacgccggcgtacacattgccggaaccacaggggtattcggtgaagagcttcagctcgaactcgtatcctggaggacgggcagtagcatcgaaggcgaacactcgccccaccagcccgtgatccttcttgaagcgcacattgaacggggcgcaggcggacagcgccagtagctgttcccgcactgctttggggcgcccgtgccattcctctgcccggcctcgcatggcctcgttcagttctgccagacagtccgcattcctctgctgcttctctttctcgaaatcggagccgaagaggggacgggcaggactcaagccgggtgccagcgtcaggcctcggcttcccaggccagacactgcagctgccagcagcccagggggcatcaagccaggcatggagccaagcaaggcccttcgcgccccctcagccacggcctcctcacggcccagcccattggccaggcgggaccccagagtgtactccagggcgggcgagggcagggggaggcggcctgatgatgtggccctgtcatagcggtcctggcccgacacgccgccgccggtccctgacggctggggctgggcctgcgggggcggcagctggggcccctgtgcggctgccgccgccaggtccttggtggccgggtgcttaagggccgggggcccgggcgagcggccctcggggagcacgtggctgcgcttgagctggcgggcggcatcgatgagcagttcgatgcggtccgcgccctcgaagttcacgcagccgcgacacacggcctcgctgaagtcccacaccatggcccacggcatcttgggcaggtcgcacaggtagcaccactggcggcgggacgcctgcacagacgccatggccccagtccgcgcgccgcccagctcccgcgttccaccggccgccgacgtgcgatccgcgccgccaacgttcgatccgcgtcccggggacagcgcgagccacggtccggcctccggctcggcctccccgccggatccaggcccggccccccttccccgccccctgggccctaagcctttctgctcactcccgcctccctcgcgaaggcaggctgaggcacgtcggcgcccccgcccggtccgggctccgagccgaggcgcacagctcgggccccacgatgggccgcgagcgccgccgcctcgggctcccgccgctctcgccgccgccgctgcaacggccgccgccgcctccacctccttcttctgccccagaggccgcttcgcagggaaagttacataacacgcctgcaaagccttctgggaaacgtagtcccgccggggccggctcttaaagggaacggcgggcagacgcgggctgggggggttgtcgcctctgccggcgcaaaccttacaaccttctccgtggggccggagttcagcgcgccgcaagatgctgggacacaaaggtggtaggcgaggatgcaatacaaatgatcagagctactccggattcagaaattgtgggggtgggtggacaggcttccgggcttccaacttctgctcggatttgctgtgcagctttaggcaaaatgtcttgccctctctgaacctcagtttccccgcccagcaaaggtgggccaatgacggattaggaaagtagcagcttctggggcggggcggagaagccctgattggcttcagagcagggacgggaagctggcaactaggtgggggtgggggtggccacctggcacttcgtcctccccccggaatcctagatatatgcttctggggcccgccacagccagagaagggagaggactaagggcttccgagccagagccttgtctcagttgtttctctgctaaaagagtggggcgactggccgccctctaaccctgtcccagctctgcccgcgcgctctggtctctaaagggttacaccatcgggggctcggcgtcccccacccgcttcactacaattcccaaaatgcactgcgggtcggacatagtgacgcacttccgccctctgggaggtttggggaggccttccagattcacgctactttcccggctaccccccgcccccccacttttctgggggctctttacgtgcattcggagcgtggcgtttgggggacccttatcttctgttgctccccagtttgagggaagagtaaggggttaagaagtgacgggcaagaggagggagttgctggggaagggcaaacaccagaccaacctttccccaaccttgagcgctcactacctggaaggcccaatcaggctgtgaggacccttcttctttcccaggcattgggaactggacgaggctgtctttggggaagggcggaggcgggtctccaggttccaacccacaacagcccctttctctaggcctgggtccgtgttaggtgctcaaaaatatttgaatgacgtaccagttggccctggttttgtctagtgaggggctgcttgtcccttctcctcccgtcccactggaaccgcagcagctctgattctgttacccagacctcacaattttaaaatggtttcacaattttgtctactacctgtatttgaacacttttctcccttaaaaaaaagatttatcaggctgaagtgggaggattgcttgagcctggagataacaggctacagtgaaccatgattgcgtcactgcactccagcctgggcaacagagcaagatcctgtctcaaaaaaataaataaaaataaaaagatttatctatttttgcctcatcctaggtaatacgttcacaatcatgggtttcatgtactgtggttaccttaaaaaaaattagtgaaaactatcgactcattcaagaggacattaatatgtcacttaaagttgcctttgggctattatttacgaaacactaatgggagttaaggcttctggccagattcagccttcaggtggactggattggcctctgaccagctgtggccttgggccagtttctaaacttcttggaaaaaatggagaccccctccagtctccttttatttgggtaccttcagattgaatgcaaacatgcatataaatgcttagcttggtgcctggcacagaaaataagtgccacaaatggaagttgtttttaagctggacagttattcaaatattcaacccctcttccatgctgggcaatgctggggacatagcagtgactgagacaggctttaagccttgcccctgagaagccccagcctggtgatggaggcagatagtaaatttactcaaatgatgaactaaaatttgtgatgactgcggtggggaatgtgtgtcaggaaaagctttcctggccatagtggctcatgcctgtaattccagcactttgggaggccgaggagggcggatcacttgaggtcagaagtttgagaccagactggccaacatggtgaaaccttgtctctactaaaaattaaaaaattagggggccgggcgcggtggctcacgcctgtaatcccagcactttgggaggccgaggcaggcagatcacaaagtcaggagattgagaccatcctggctaacacggtgaaaccccgtctctactaaaaatacaaaaaattagccaggtgtggtggtgggcgcctgtagtcccagctactcgggaggctgaggcaggagaatggtgtgaacccggaaggtggagcttgcagtgagccaagatcgagccactgcactccagcctgggcgacagagtgagactccatctcaaaaaataaaaataaaaaaaaaataaataaataaaattaggccggacagtggcagtggctcacatctataatcccagtactttgggagccctatcacttgaggtcaggggttcgagatcagcctggccaacacggtgaaacccccatctctactaaaaagtacaaaaattagccaggtgtggtggcgcacacctgtaatcccagctactcaggaggctgaggcaggagaattccatgaacccaggagatgagttcacaccactgcacctccagcctgggggacagatgcaagactccgtctcaaaaaaaaccaaaaaacaacaacaaaaaaacaaaaaactaactaaataagtaaaaatacaaaaattggccaggtgtagtggcacacgcctgtagtcccggctacttgggaggctgaggcagaagaatcacttgaacccgagaggcagaagttgcagtgagccaagaccgcgccactgcactccagcctgggcgacagagggagactctacctcaaaaaaagaaaaaaaaaaaagaaaagtataatctaattataggaagaaagactctgacatctttatgtccattctacagatgaggacactggaagccaatggttacacagttggccagggcagcaccagtacttgagccacgtcttgagtccagagtggtggtgattatctactttgttacctggccctgcagcagagtaaaagaaccagttcctgccttcatgacattatgggcaaatgtgccttaaatagataaaggcctgtgttcatttagagtcactatgaaaaagaacccagctgtgtgtggtggctcatgcttgtaatcctagcactttgggaggccgaggtgggaggactgcctgagcccatgagttccagatcagcctggacatcatagaaaaccccatctctagaaaaataaaacaattagctgagcatggtggcacatgcctgtggtcccagctacttgggaggctgaggcagaaggattgcttcagcctgggagatcgaggctacagtgagttgtgatcatgccactgcactccagctggggcaacagaacgagatcctatctcaaaaaaacggaaagaaaagaaaagaaaggaaaagaaaaagaaaaagaaccacaggacactgaaagagactctaagaggcaaacccacgttagccttggggaaggaatctaggactttctcctggagttgacatttagactggtatctaaaggaagagtaggaataagatttcatgtaaacacaagacttgatggctttaagaattaaaaaaaaaaaaaagctggaaaaccaccagcctcccaattgcctgcctgtggagggggcggggcaggtgtaggtgctggtcccccaggcctgtctcagacagagcctcaagtaattgtattaaaaataagtttattgatatcttgtcaccactgggagaaaggagggggttgagctctggaagtcagagacagcaatggtaggcagagaacccaacctgtacctctcccatcagaactcggcgcctcctctccctggggtatacacggctatatcctctttgtcatccgtattttgatttgtcttacaactcccacccgctccaaagtctgggttggggaggtggggagtcccccacgggtcaattctcttcaagtcaagaacaggaactgttagggaaggggagatgtgcagacccgagaggttccctccccaccccacatagggcaataataaataacatgaaattgatggcttagaagtcagggttaagggaggcagccaggcagacagcactgtaccagagaaaggggttgggggggcccattactgaggccccccccagagaatcaggcactaactagcacagggagtgggtgctcacatccctggagcagggagctagggtgcagctgggatgggcagagagcatcgcccccctcgactgcgccaagctggggagaggggttgcaggcaggatcatagatagtagatttcacggagatttccatcggccgcgccttttccgtgtagggaaaccttttctccgcttgtgtgggggggagtcgtgcggagggagcggggctggggggggccggggtgccccctcctcgctccttggggcaatgatcactcccctggctgccaccactgccccgtccaccacagcagccaccacggacacgggctctggggtgatctccaccttgggggccggtgggggcaggacaggcctgggaggtggcggtgggggtgggggtgggggcagaggtggaggcagggagtcaactggggttcctggcagaaggggcagcagagcgctgagggcctcgctcagtttggccagtccctgtcgaagggtgccggccagctcccggatggcgttggcagtctcctgctgggcccgcaggaagtccagggaggggtctgaggccgagagcgtgggtggaggccgaggagggggtggggggctagggggtgagggtgccacttgggccagtggcggtgggggtggcagtggaggggctgggggtggtggagacaaggccaggcgaggcagctggaccggctgcagggccgaagggggtggtgactcacgctccttgggccgtgggcagcccccttcctggggagtgcaggagggccgggcccatggctccgggctgctggagcccgccttgctgtgggctgatgtatctgtagagagagaaatacaggtaaggggtgagcgaccctcgatgctgccttgatttcccctttcccactccttccctcacctcccccctacccgaacccagaactatccttctcacccccgccccccagccccaagacagtcttggtctgtcacccaggctgtagtgcagtggtgcaatcttggctcactgcaccttccacctcctgggttcaagcgattatcctgcctcagcctcccgagtagctgggatttcaggtgaccgccaccacacccggctactttttctatttttaataagagacagggtttcaccatgttggccaggctggtctcggactcctgacctcaggcgatccgcccgccttggcctcccaaagtgctgggattccaggtgtgagccaccgcgcctggccccagaatgatccttttaaaacctaagtcagatcatgccttggaagagaagctccatggcaggccagtctttgtacccggaggagaaaaagtcctgccagctttagtggaaacaggtcctggaagtcccttgctaggccaggcagctcccatctcactcacagtaagagccaacagtttttttatttttttaattttttttgagacaaagtctcactttgtagcctaggctggagtgcagtggcgtgatctcggctcactgcaacctctgtcttccggcttcaaacgattatcctgcctcagcctcctaagtagctgggattacaggcaggcgccaccccgcctggctaaatttttgtatttttagtagagatggggttttgccatgttggccaggttggtctcaaactcctgacctcaagcaatccacccacctcggcctcccaaagttctgggattacaggtgtgagccactgcgctcggacaagggccaacatttgacgaggttctgaactatatggatactgcaccacactgctggatcctgaggaagtgagagagaggtctgggagagagctggggtgtctgggcactggtggacacttccctgagactctctccaaccaggacagcaggattttccagttcagcccccagcctggtaggtttcctcagtctgtactcacctggggtctcattcatgctcatgggcttgaacagtttgcatacaggggctcccagcttcctgggctcagcctgaacctctcgcctgggctccagactcctgtctccagctgtgtactctcaattgtcgaaaaacgccccaaactcacttgctcggagctgggcttctgatcctcccccaccctgctccttcctcagccacccccatctcagctgatgcagctccatcctcccagctgctcaggttaaacaccttcactgttttgtttactaagacaccatccacatacagaagctatcgtctctgccttcaaattaaatacatacaacttctttcttcctggtcccccaccctggcccaaccaccagtatctcccaccaggaccactgcagtcatcgcctccctgagggctctctgcttccacccctgtccctgacagtatctttttccaccagcagcctgaggggtccaaccaaaatacaagtcagttaggctacgggaaacaagctagtcacaaagaaccacagatcacaggggccatttatatgaaatgtccaaaataggcaaatttggccgcatgtggtggctcatgcctgtaatcccagcactttgggaggccgaggcgggtggatcacctgaggtcaggacttcaagaccagcctggtcaacatggtgaaaccccatctctactaaaaatacaaaaaattagccgggcatggtggcatatgcctgtaatcccagctactggggaggctgagacaggagaatcgcttgaacccgggaggcggaggttgcagtgagccatgatcgtgccattgcactccagcctgggcaacagagcgagactctgtctcaaaaataaaaataggccgggtgtggtggctcacgcctgtaatcccagcactttgggatctgaggtgggcaaatcacctgatgttgggagtttgagaccagcctgaccaacatggagaaatcctgtctctacgaaaaatacaaagttagctgggcatggtggtgcatgcctgtaatcccagctactcaggaggctgaggcaggagaatcgcttgaacccgggaggcagaagttgcagtgagctgagattgcatcattgcactccagcctgggcaacaagagcgaaactccgtctcaaaaaaaaaaaaaaaaaaaaggcaaatctatagaaacagaaagtagatgagtggctgccgggggctgggggaagacagggaagatgggagattggggatggctaagaggtgcagggtttctttctggagtgatgaaaatgttctaaaattgatcgtggtgatggttgcataactctgaatatactaaaagccattgaattgtacgctgtattttattttactttttttttttttttttgagatgggagtctcactctgtcgcccaggctggagtgcagtggcgcgatctcagctcactgcaagctccgcctcctgggttcacgccattctcctgcctcagcctcctgagtagctgggactacaggcgcccgccaccacgcccggctaattttttgtatttttagtagagacggggtttcactgtgttagccaggatggtctcgatctcctgacctcgtgatctgcccacctcagcctcccaaagtgctgggattacaggcatgagccaccgcgcctgatcctgtacactttatttttaatttttatttattttttattttttgagacggagtctcgctctgtcgcccaggctggagtgcagtggtgtgatctcggctcactgcaagctctgtctcctgggttcacaccattctcctgcctcagcctcccgagcagctgggactacaggtgccctccaccacgcccggctaatttttttgtatttttagtagagacggggtttcaccatgttagccaggatggtctcaatctcctgaccttgtgatccacctgccttggcctcccaaagtgctaggattataggcgtgagccaccgtgcctggccttaattttcatctttttttgagacacagtcttgctctctcgctcaggctggagtgcaaaggtgagatctcggctcactgcatccttaatctccccagcttaagcgatcctcccatctcagcctcctgagcttctgggaccacagaggtgcgaccccacaccaggataattttatttttttgtagagatgaggtctcactatgttcctcaggctggtttcaaactcctggtctcaagcaaatcgtacactttgaggtgattgtatagtgtggaaattatatcgccatatatatatacatttttttcttttttcttttttttttttgagatggagtctcattcagctgcccaggctggagctcagtggtgcgatctcggctcactgcaacctctgcctccagggttcaagaaattctccaccctcagcctcctgagtagctgggactataggtgcacaccaccatgcccagctaatttttgtatttttagtagagacggggtttcaccatgttggccagatggtctcgatctcttgacctcgtgatccacccacctcagcctcccaaagtgctgggattacaggtgtaagcactgcgcccggccttatattgcaatataattgtttaaaaaaacacaagtcagatattgtttctatgctcaaaccgtcctgtggctctcacctcactcagggtaaaagcaaagtccttgaggcctctagggccctgcacgatcttcccccattgccttcctgacctcagctcccatccctccctcttgggttacctggctgtagccacggtggcctccttgctgatcctcaaacacatcaggcctacttcttttcttttttttgagacggactctcattctgtcgcccaggctggagtgcagtggtgcaatctcggctcactacaacctctgcctcctgggctcaagcgattctctcacctcagcctcctgagtagctatagctgggactacaggtgtgcaccaccacgcttggctaatttttgttttgtttttgtagagacagggttttgccatgttgctcaggctggccccatctccttctttttttctcccctaaccctacctgattcctctcccagcacttatctccacctggcacggtatggctctgtgtctgctgtctgtctcctcctcctgatgtcagctccatcaggcagggctttgtattgctcccttctgtttacccggcgcctagaacaatgtccagcacaacattttttctttaacgagaaaagaactggggcttccagagactcagcgctgattgggtcccaggccccagagtgcccagcacccacaggagaaagtccagcctcttcccacggctatggggcctcagcacttgcccccaactccgcctgtcttcccacatgtcgttccctgggccaggctcacactgcctcttgcatcagcttggatgtttttttggatgttccttcctcggggaagctggcctcctgctccttggccaaatcagatcaccctgctcttctctcaaaaacagccagccaaagaaagagagaagatagagaaaaaaaaaataacaaaaacaaaaaaccaaccatccaggccgggtgcggtggctcagccggtaatcccagcactttgagaggcccaggcaggcggatcacctgaggtcaggagtttgagaccagcctggccaacatggtgaaatcctgtctctactcaaaatacaaaaattagccgggtgtggtggtgcacgcctgtgatcccagctacttgggaggctgaggcacaagaatcgcttgaaccctggaggccgaggttgcagtgacccaagatcacaccactgcactccagcttgggcgacagcaagaacctgtctcaaaaacaaacaagcaagcaaacaaatcagccacctcctaccctgactgctgggagtccagcctccctgggccagccaccagcaggaggtagggaggctgggagacagatgagtagagcggacagtgacaggacacctgctcccgccaggccctgggctaagctcccctcttaagtgattccacctagtcttcccagccattctctggggtaggtgctaccatgatcatcgccccattttatagatgaggtgatttgaggctcagagagaggtgtcatagagtgatatgcagaaaagggatttgaacccaggttgactccagagtccattcttttttttttttttttttgagacggagtctcgctctgtcgcccaggccggactgcggactgcagtggcgcaatctcggctcactgcaagctccgcttcccgggttcacgccattctcctgcctcagcctcccgagtagctgggactacaggcgcccgccactgcgcccggctaattttttgtatttttagtagagacggggtttcaccttgttagccaggatggtctcgatctcctgacctcatgatccacccgcctcggcctcccaaagtgctgggattacaggcgtgagccaccgcgcccggcctcttttgttttatagagatgggagcctcgctatattgcccaggctggtctcaaactcctggcctcaaatgatcctcccgccttggccttctaaagtgctgggattaccggtgtgagccactgctcctggccagagtccatggcctttttttttttttgagatagaggctcactccatcacccaggctggagtgcaatggcgtaatctcagtttcctgcaatttctacctcccagtgcaagcaattctcctgcctcagcctcccgaggagctggaattataggcatatgccaccatgcctggctaatttttgtatttttagtagagacaaggtttcaccacattggccaggctggtctcaaactcctggcctcaagggatccgtgtacctcggcctcccagagtgctgggattacaggtgtgagccaccacaccaggccagagtccatgctcctaaccattccttgggcaagggctgtgggcctggggtgtgagtgacaaatcttccttataaggaacgtgggaattgcagaaacgtggcttttccagtctactgagtaaaaaggaacagaaagtagcccagccttcatgcccacaaggctcacaggagtcacagcagtgcccctgcaagagtttgtttttggttgttttgaggaagggtctcactgtgttgcccaggttggagtgtagtggtgcgatcatggctcactgcaacctccgcctcccaggttcaagggatcctcatgcctcaacctcatgtgtagctgggaccaaggcgccggccaccatgcctggctaatttttggattattttgtagagatggggtctcactttgttgcccaggctggtcttgccctcctgggatcaagcaatcctcccacctcagcctcccaaagtgctgggattacaggcatgcctctgtgcctggcttccactgtttaaaagttaaaatcatatttatttgcaaactttggatctcagtttccctacttgttttcttttctttttttttttttttaagacggagtctcgctctgtcacccaggctggagtgcagtggcacaatctcgactcactgcaacctccacctcccaggttcaagtgattctccagcctcagcctcctgagtacctgggactacaggcgtgtgccaccacgtccagctaatttttgtattttttagtagagacggggtttcgccatgttggccagactggtcttgaactcctaacctcaggtgatccgcccgccttggcctcccaaagtgctgggattacaggcatgagccaccgcagctggccctcagtttccctacttgtaaatgagtgtgtgagctggtactacacagagtgctgggatttcaggcgtgagccaccatgccaggcctgtgtatggttcttttttttgtttttttttgagactgagttttgctcttgttgcccaggctgaagtgcaatggcgcgatcatggctcactgcaacctctgcctcccgggttcaagcgattctcctgcctcagccttcctgagtagctgggattacaggcatgcgccaccacgcgtggctaattttgtatttttagtagagacggggtttctccatgttggtcaggctggtctcgaactcccgacctcaggtaagccacctgcctcagcctcccaaagaactagtattacaggcgtgagccaccgtgcctggccaggcctgtgtaagattctaatcgaggatgctctacgcgtgttcctgcctcagagcttttgcacgtgctgtttcctctagtctagcaggagtgcccttctcccagatgtctgtcaggcctactctattcccatctctacttgaatttcaccttctcagagaagccctccctgattaccctgtctgtatagcccccttccatgactcaccatcctctgaatatgacttatttatcctcttagttctcaccacctcctggtatacagtctgttttgggacttctttgtggtctgtttcctccaactacatagaatgtcagctccaggtcgggtgtggtggctcacgcctgtaatcccagcactttgggtggccaaggcgggcagatcacctgaggtcgggagttcgagaccagcctgaccaacatggagaaaccccatctctactaaaaatacaaaattagccaggcatggtggcgcatgcctgtaatctcggctactcgggaggatgaggcaggagaattgcttgaacctgggaggcggaggttgcggtgagccgagattgcgccatttcactctagcctgggcaataagagcaaaactcagtctcaaacaaacaaacaaacaagcaaacaaaaaaagaatgtcggttccataagggaaggggattttgtctttttctctacattattccctgcacctaccacagcgtctgccttggatgaggttctcaatatatatttgctaaacgagtgaatgaagtggtaacaagtttctgaaaaaataagttggccatctctgctctggtcctatggggccatctcacagatggaaacactgaggtttgattcaaggtttgagaacaagggtcccatgtgattgtgtcaccttcctgcttaggagattttcatgcctcctgaatgccctcaagagcaagtccaggccgggcgtggtggctcaggcctgtaatcccagcactttgggaggccgaggtgggtggatcacctgaggtcgggagttccagaccagcctggtcaacatggtgaaatcccatctctactaaaaatacaaaaattacctgggcatggtggcaggcacctgtaatcccagctactcaggaggctgaggcaggagaatcacttgaacctggggaggcggaggttgcagcaagccaagatttcgccactgcactccagcctgggcaacagagcaagactccgtctcaaaacaaaaaacaaaacaaaaaaaatagtaagtccaaattcctgaccttgacttccaagccacgtgtaatctaattctggcacactcattaactcctggtcaatattaactcttgttattgctgggcaatcttgctcagtggttaagtgccatggactgggggttggacgcacacttatgcttgagtcctgactctgtcacttacttgctgtgtgaccttgggtgggtgaatgaacctctctgaatcacataatcttgaactgtcttgtttgatcatgcccatgttcctccccttctccaaactcttcagtggcttctcatagcagtcaggataaaatccaaactcctcaccttggcctaaaggcccagtatggtctggcctttgctgacctctctgaactcatctcaaaatgttacttttcttcaacctttccactctacactcttttccccgcaacttcttttagtttcccaaactggccaagctttcttgcctccaagccattgtacatgctgttccctctaccaaaaatactttcccagttcttcattcttactctttgcatctcagctctgatgtcccctcctccaggaagccctcctggaccacccccccccccaccgaaatcagaaaccctctctgggctcccacagtccctgggatcccctaccccagccctgctccctcaagtcatcaccgtcttccccacccccctactagactggctcagtcatccatgtgtccccaacctcatcgagcatggggcaggtgctcagggaacggctgtagaagaaataatccagaatcaaggctaagcaggaagtttctgtagtcagctctccacacctctatccaaggcatgaccttgggaaaattaccaaacatgtctgagtcttttatttatgaaatagtgaaatagtatgcatcttaccgcattgatgattctatcaagaactaacaatgagagttgaggaggtgctgaactaagcaacttacccatattagctcatttaatcttcacagcaacgctttgaggtgcagactatttttatctccattttacagatgcagcaactgaagtacagtaacttactcagatgacacagttcagtggcaaagttgtgatcggagcccaggcagcctgcctccagagtcactactcgacactgcatttaatgaaatcctgcctgtgctgatgaccccaggtgtggacctgagtcaggcctcctaaatctggttccattcctggctcttgacagttactagctatcggaactgaggcaagtcatttcatttttctgagcttcagtttccctagctataaaatggggcgaaggacagcatccacctcacagggctgcagcaaggctttgatgagacatgtaaaaggcttgcaacagcgcaggcacacagcctactctgaagacactcacctgcacgtcggtcctcccggcggtcttccgacaacacgtagcgctgagggcaggcgcttgggggcggcggctgtgaagagggggccgcagggggctcctccgccccagcacctgcccccggcgccgccacacctggccccaggatggcaaaaatggtctcctcttccgcggagaaagcgtcctccgcggcgggcccggcgccctgcgtggagtgcggcacgcgagcgagcttctccttggtgcggcgcttgaagtcgttccagcgcttctgcacctcctggcccgtgcgcttccagctggtgataccgttgatcttggcggcgatgccgtcccacacgcgccgccgctctgccacgctcacccgacggctctgcgcgccgtagagctgcgggtagtgggcgcgcacctcgcggatcaggatctggttctcttcgaatgagaagcgcggcttgcgcaaccgggtggtttcctccgcttcgcccgccgccgccgaggccatggcgccccccgacgccgccgtcctgccgtctggcgcatggggggcgccggcgctgcgggcaaagggcgcacggggctggctggggttcggggtccccccgccgccgcctctcccagaccgccgggccgagagctccttagtccccgggggcaggagtgggggcggggggcgggcgggggcgacgggcacccgggtaagtcggaagcgcctaagagtagctgacaccggctgagcgcttggctcggacttcgcgcggcgcgaagtgccacgctgaagagttgatagaaattgggggagggtctggagggatggaaggaaaggaggaaaagtgcgaggagaggaggtgtctgcaggagttagagaatgggggcacgggaggataggaaatggagggaggatgggggtgcctcgggggggtcttagatgcatgaagataaggagatgcggaaggggggatgcagcaagaaggggggaatctggagcagaggaggcgctctaggggctctagggggcaacggggcgtctgtaagaccgatatgagaagggcccttagagggatgtccaggaataatggtgaggtgggagctcctgtatcactggaagagctggaacgatcaaatattagggatcagggtctgcgaggattgtgggggctctggggattgccagaaattaaggggagctctggaaataacgggggtcccgtatcacaaggagacaacggaggctacgggggacggcagggagagcgaaggtcgcggagggtggggaccgagtcgggccacgggtcactcaccggctccgccgcagccgccggtgggtcagggctcgggcttctgcggcctgttcccaccccccgcctccctccctcccctctttcggccccgcctccggccgccccgcatgccaaggcgcaggcgcgcccagggccagtcggccccaatgcccttaccgccagggtttcattcccacctaccccagcacagcgcaggcgcagaactgcgctccgccgagccccaccagcaggccgcaactgcgcagccgcaacgttagcgccgcgcgggtaccccagcttcctggggccacaacggcgcacgcgcaaaaactccatcgcgcgcatgcgcgtgcctcgggttgtacccggtaccgggtctcggcgcaggcgttgcgagcttggatgggagagatgctgggagcgcgccagtacccaacctttcggacagtcttccagcccaccctgccctctaaccaaaggggagggagacagcgctgaagggaagcgctttgtctccttgacaactgtgtgggtggggtggaggcgtgaggaaaccgctttgcctcctggcttgcccgcccctgcgctgggccgctccagagcttcccacctcgcacccctagaggctgggcgtcctggggatgtcccgccccgggcggatgcagtaaccatagcgacccacaagccttccagtcacgccttgggggcccctctgtgcgcacctttacctcgaggagcggggaaaataagagggaagagcttcctggctggtaggaagggagatcctgacgccggcacgactttaagcaagtgcatggagacaggaatgaagccagaacgcaggtggggtgagccgcatggcaggatgatggagctcagtccggctgagaagtgtgttcgttagcatcctgcaggagtcctcaaggtcattcgacaattggtgcttcattcatcgactcaataaatatacatgagcacttacacagttcctggtacaatgaacataaaagctaaaatccgtagcctgggccgggcgcggtggagctcacgcctgtaatcccagcactttgggaagccaaggcgggcggattacctgaggtcaggggttcgagacaagcctggccaacacagtgaaaccccatctctactgaaaatacaaaaactagctgggcatggtggtgcatgcctgtaatcccagctactcgggaggctgaggcacgagaatcgcttaaccccgggaggcagaggttgcagtgagctgagattgcaccactgcactccacctggacgacagagtgagactccgtctcaaaaaaaaaaaaaaaaaaaatacatgcctgtagtcccagctacttgggaggctgaggcgggaggatcgcttgagcccaggagttgcaggctgcagtgagctatgatcaggccactgctctccagcttgggcaacagagtaagaccctgtctcaaaagaagagagagagaaaaaaaaggcccctctgcctgctgtgtggagggtgggtgggagggagcaagactactgggtagagtcaaaaaaagtcatgagcaggggtaagaaaaggattaggaaagcgaggggagactaaactaagacagggacagtgtcaagggggacacggagagacatttgagagaatatatggaaagcatggtgagtgtcgcgctagcgagggaaaggaagatgtctaggtgaaacccaagtctctggcccaggttctcacttgggggtgtggggtcaggtaagatgtggtgaatgtaaggctgggtgcagtggctcacgcctgtaatcccaacactttgggaggctgagacaggtggatcatctgaggtcaggagttcgagaccagcctggccaacatggtggaaccctgtctctattaaaaattcaaaaaaaaaaaaaatagctgggtgttgtgccatgtgcctgtaatcctagctactcgggaggctgaggcaggagaatctcttgagcctaggaggcacagattgcagggaaccgagatctcaccactgcactccagcctgggcgacagagtgagactctgtctcaaaaaaattaaaaaaaaggccgggcgcagtggctcattcctgtaatcccagcactttgggaggccgaggcaggtggatcacgaggtcaggagattgagaccatcctgactaacatggtgaaaccccgtctctactaaaaatacaaaaaattagccgggagtggtggcaggcgcctgaagtcccagctactcgggaggctgaggcaggagaatggcatgaacccgggaggctgagcttgcagtgagctgagactgcgccactgcattccagcctgggggacagcgtgagactctgcctcaaaaaaaaattaaattaaaaaaataagaacaacaacaaaaaaaacacaatcaaaaaaagatacgtgagtgtaaagtgaccaacaggttgaactgtttcccccaaaaagagaggctgaagtcctgatcccccagtgcttcagaatgtgaccttatttggaaatagggtccttggagagggaattcgttgagaggtagccataccagtgtagggtggacccgtcattcctcattcccggtgtctttataagaagaggagacacacagggaagacaattctatggtgacagaagtggagacgggggtgacgcagccacaagcccaggaaggccctgtgctatcagaagctggaagaagccaggaaagatcacccgctggagccttgtccggagtgaggccacgcccatgccttgatttcggattttcagcctggtgaatctgggagacaatacgtttctctctctctgttttttttttttttttgaaatggagtcttgctctgttgcccaggctggagtacagtggcacgatctcggctcgctgcagcctctgcctcccggattccagtgattctcctgcctcagtctcccgggtaactgggattacaggcgcatgccaccatgcccagctaatttttgtatttttagtagagacggggtttcacagtgttggccaggctggtcttgaactccttacctcaggtgatccgcctgtctcggcctcccaaagtgctaggattacaggtgtgagccaccgtgcctagccacgtttctcgttttaaaccacccagtttgcggtaccttgtcatggcagccacaggaaacaaatgcactggggaccccgggaaggcattcggggagctgcattcagggagctgctgcctccatggcagtccaggcagagagttgagtctaaacctggctctgggttcacgaggcggtgggaggtggagagccacagcagtggggtatggagctccacagatgtgggtagctggaagctggatgcaggaagtcagagggcaagactcctggggtgagggtgggtcagggaaggctttctagggccacattttctttcttgtcttgcctcttttcttttcttgatggagttttgctcttgtcgcccaggctggagagcaatggtgcgatctcggctcacagcaacctctgcctccctggttcaagcgattctcctgtctcagcctcctgagtacctgggactacaggggcacgccaccacacttggctaatttttgttttttttttagtagagatgggatttcacccgtgttggccaggctggtctcaaacacctgacctcagatgatccacctgccttgtcctcccaaagtgctaggattataggcatgagccactgtgcctggcgaagggccacattttcaaaactgtgagttgtgagtccttttttttttttttttttgagacagagacttgctctatgacccagactggagtgcagtggtacaatcatgcaatcatgactcaaacttccaggctcaccctcccacctcagcctctagagtagctggaactacaggcacacaccatcatgcccggctaagttttaaaattttttgtagagacaagatcccactgtgttgcctaggctggtcccaaattcctgggcttgagcaatcctctgtgaggcctcagcctccaagagtgttgggattacaggcgtgagccactgagtccagccaaaactgtgaatcttgacccattagtgagtccaggaaaatacttaggaagttgcaaggagagatatttaggaggaagaatggacaggacttggaacctgatgggctgtgaggggtgagggaaaaagcctagatctctggccctggagacagggtacattacatggtagggccggccaagatggggacttgaggggtagcagatgtgggggtaagatgctgaagtggtttgggatgtggtgggtatgaaaggcctggggaggtttggggaatgaggaagagcatccaggaacccatcaggtatgtggaagagggctggaggcagaggcggagtggaagctaaatttttgttttgttttgtgttgttttaatgctaaaagaaatggatgcaacaagcatatcaagtgctgccctagggctgggcctggttgctcatgcctgtaatcccagcactttgggaggctgaggtaggaggattgcttgaggccaggagttcaggctgcagcgagctattatcttgccactgcactccagcctggacgacagagcgagactctgtcttttcttttcttctttttttttttttaatttaaaagatagagatgaggtcctgctacatcacccaggctggttttgaactcctgggctcaagtgatcctactgcctcagcctcccaaaatgctgggattacaggtgcgagccactgcactggctgataccctgtcttaaaaaaaaagaaggggccaggtatggtggctcatgcctgtaatcccagcactttggaaggctgaggcgggtggatgatgaggtcaggagttcgagaccagcctggccaacatggtgaacccccgtctctacgaaaaatacacaattagccgggtgtggtggtgcacgcctataatcccagctacttgggaggtggaggcaggagaatcgcttgaaccagagcggaggttgcagtgagctgagatggtgccactgcactctagcccggcaacaagagcgaaactctgtctcaaaaaaaaagaaaaaaaaaagtgctggccgtaggcacctgggatacagcagtgaataaaatactgaactccactctcagagcttcctttctagctggggatggtggatggacaggaagtagctcacttcaatcagggataacacggaggaacagagccagtagggggtatgtatgaagtgatctgttgcaaggaattggcttacaggattgtagggccggctaagcaacttcaaaatccatacacagggcaccatcggaaagtgcaggctggagctttgggcgtgaactgaagccactgtctacaggcggaatttcctcagggaagcttcggctctgctctgaaaaccttttgactgattgcagcaggcccacttagattattattattatttatagagacggagtcttgctctgtcgcccaggttggagttcagtggcacgatttcagctcactgccaacctccgctgccccagttcaagcaattctcctgcctcagcctcccgagtagctgggactacaggcgcccaccaccatgcccagctaatttttttgtatttttagtagagacggggtttcaccatgttggtcaggctggtctcgaactcctgacctcagatgatccgcctgcctcggcctcccaaagtgttgggattacaggcgtgagccactgcactggcctattattattattattactcgagacagagtctcactctgtcacccaggctggagtgcagtggtgcgatcttggctcactgcaacctccacctcccgggttcaggtgactctcctgcctcagccttccgagtagctgggactataggtgcatgctaccatgcctggctgatttttgtatttttagtagagacagggtttcactatgttggccagtctggtcttgaactcctgacttcaggggatccacctgccttagcctccgaaagtgctgggattacaggtatgagccaccgccccctcagattatctaggataaatttccttccttaaggtaaactaattatagtctttaatcacatctatgagatatcttcacagcagcagctggattcatatttgactgaatgactggggacagcggtctagacaagctgacatgtgaaactgaccattgcaaccagagacataataaacaactcagccatgtggcatgttagatggtggtaagtgctaaggaggtaagaaaagtagagatgggttggagggatcaggaatatgtgggtgggaaggcctcggggaggtggcggcctttgagcaaaggcttgcaagaagtggcagagtaggccatgtgagtatctggtccaagagctgtccaaggagccggaagggtgagtgcaaaggcctcgaggccagaatgttccagaagtgttcggggaacagcttagaggccaaagtggctggagaagactgagcaaacgggagagggtgggaaaagagccagacttgggtgagaggcagattgtgtggggccttgtgggctgagatgaggattttggcttttagtcagagtgagacagtgaccacaggagggctctgagcagaggagggagatgagctggcttgtgttttaatgggatcacttttgttgggttttgaaaatatactcttggctgggcacagtggctcacacctgtaatcccaacactttgggaggccgaggcaggtggatcacttgaggtcaggagtttgagaccagcctggtcaacatggcaaaaccccatctctactaaaaatacaaaaattagccaggcgtgatagcggtcacccggaatcccagttactcgggagcctgaggcaggagacttgcttgaacctgggagatggaggttgcagtgggccgagatcatgctactgcattccagcctgggagactgagtgagactccatctcaaaaaaaaaaaaagagagaaagaaaataaaatatactttttttttttttgagacagtctccctctgttgctcaggatggagtgcagtggcgccttcttggctcactgcaacctgcgcctcccaggctcaaagattcttgtgcctcagcctcccaggtagctgggattacaggtgtgcaccatcatgcctggctaatttttgatttttagcagagacggggtttcgccatgttgaccaggctggtcttgaactcctggcctcaactgatccacctgcctcggcctcccaaagtgctgggattataggaatgagacactgtgcccagcctgaaaatatacccttaggggttgagagtagaagcaggaagatcattgaggaggtgactgcagtactctgggtgagaggtggtggggcattggaaggtagtgtgctggagaagagatggtcagatttgggatggatgttgaagctagagccaagaggatttcctaatgaatgtgagatttctgttttggactggataaggaggagggaaggaaagaagggaaggaaggaaggaatgtggggagggagaaaggagaaagaaaggagggcggaagaagaaggcaaaaacgacagatggagagacacgttaagagagaatctggatcgggcacagtggctcatgtgtgtaatcccagcactttgtgaggcctaggagggaagattgtttgaggccaggagttcgaggctgctgtgagctatgaccactccactgcattccagcctgggtgacagagcaagactttttgcgggagggcagagagaaggagaaactgaatgataaacctaaaagtgatctctcaacattcttagtacaaattaaaaataaagacttttgttaatagtgcgatcttggctgggtgcagtggctcactcctgtaatcccagcattttgggaggcctaggcaggtagatcatttgaggtcaggagttcgagaccagcctgggcaacatgatgaaaccccatctctactaaaaatacaaaaattagctgggcgtggtggcgcatgcctgtagtcccagttacttggtaagctgggcaggcaggagaattgcttgaactcgggaggtggatgttgcagtgagccgagatcatgccactgcactccagcctgggtgacagactgagactctgtcccaaaaaaaaaaaaaaaaaaaaaagtgcaatcttttcccttcctttgtataaaattctctagaatgggccagatactggttagcattggaaataggctctaatctatggtcaccactcaccagaacccctggaaccccacgtgtgcacaaatccagtttcagagaccaacacagtggtaggcactcttggccactgtgggagtgtgaggtgcagagacaaagccttggccttatatacttcagagcacactggggactctgtgaggctctaggtctatccttagtggatctaattttcctgccctggttctttgtgggtgtagaactattcccctactctctctcctaagcccaaagtggtgctggagggaagaggccgttctgaagcatttgcttctctgcatggagtctccctgctgtcttctctgatttcctcaggggtgggcgagatggtgtctgatgcacacgggcgccacgcacaagtctccagtggcccctgcatgcccactctgcctctttgtatcttctctgagcccaggaggctgccctgtgtgctctccatctgcctgcctgcctggtctcaggttcatgggaggtaactgcaggaatggggcagatgcaggagaatgaccagctgtcctgcacctggcctcgacctgtccacagcagcaaagctctctgtacctcttcccataactctctgcatgcagccttctcacaggctccaggccggactttgacacgcacctacttcagtccagactccctggatgcctccccagagccccagtgcattcctttcctgtagctgtcatgacaaggtactgcaaactgagtggtttaaaacaagggaaacgggccgggcgcagtggctcacacctgtaatcccaacaggcatgggaggatcgcttgaagccaagtgttcgagaccagcttgggcaacaaagcaagactccagcatgcctgactattgttttgtattttttgtagaaacgggttctcactatattgaccagattagtctcaaattcacggtctcaagtgattctcccacctccgcctctccgagtgttgggattacaggcgttagccactgcacagggcagggaccacaattttcaacacctcgccaatggggtctgggagctcaaagtttaagaattaccaaaaagccggtcctggaagatcccgggggttcacagggccagagaaacccatagacatgacatgaaaagggaatggggatcaaggcaaaggcacaggaggaatttgagagccagttcataggtggcggatgtatcaggggccggctgggaggggaacccaaagccccttcctgtcctgcctccgtgttccccgtgttggatctggccaatgcagctacctgctccttcacgcagccgctgaggacaaagccagatgagaggatggaaacagaggcctgacgcagtggctcacgttgtaatcccagcactttgggaagccgagaagggcagatcacctgaggtcaggagttcaagaccagcctggccaacatggcgaagccccatctccactaaaaaaatatatatgtatatatataaaattaggcaggtgtgaggcactctggagcctgaggcaggagaatcgcttgaacccgggaggcagaggttagttacagtgagccgatatcgggctacggcactccagcctgggtgacagagcgagactccatcacaaacaaacaaacaaacaaaaaagtccaggcgcagtggctcatgcctgcaatcccagcactttgagagaccgaggtgggcggatcacctgaggtcaggagttcgagtccagcctggccaaaatggtgaaaccccgtctctactaataatacaaaaaaaaaaaaaaaattagccgagcgtgttggtgggcgcctgtaatcccagctacttgggaagctgaggcagaagaatcgcttgaacctgggaggttcaatggtgcagtgagccgagaccgcaccattggcactccagcctgggcagcaagaacgaaactccatctcaaaaaagaaaaaacaaaaaccaaaaataaaaattacctgggtgtggtggcgtgcacctgtagtcccgcctactcggtcaccccgtctctactaaaaatacaaaaatggccaggcgtggtggtgcatgtctataatcccagctactccggaggctgagaggcaggagaatcgcttgaacccgagaggcagaggttgcagtgggccgagatcgcgtcattgcactccagcctgggcgacaacagcaaaactccgtctcaaaaaaaaaaaaaaaaattagccaggcgtggtggggcgcacctgtagtcccagctattcaagaggctgagggaggataatcacttgaatccgggcagtgagccaagatcgcaccactgcactccagcctgggcgacagagcaagaccttgtctcacaaacaaaccaaagacggaaacagatacagccatttcaaagacgactagaaaacctttttattcaccagagctcaatactcagggtcccgaccctgtgccaaaaactgaacaacttaaaatctgacgggggcccttcttctctttgcccctaaaataaaagctaggccattgccattcccatccgggtactcaaacccccttcttatcggcggttccttgacttgaacgttggaggttgaaaaacacaggaggaaaaaaaaatgtcctttagtcaactatcacgatttggggggtcggacgggaggtggtcgagagatatgcttctcgctgggggaaaggacccatcggtgatttggggatgggggcaggtaccgggtgcaatgggctgaacaaggggaagaacaaccagggggcattgaaaggtgtcagctcaccccacggctctccatccacaggtgagcctgcgaagacacggtgccctccagtgatacggtgctctccagagtcctactccgctcctgacggatgggtactgaggtcagggaaggaatgaacaggcgtggtccacgatgacaccgtggttctgcaggaggctgaagatggagaaggctggtcttaagtcgacatcccatcttgaagttcttgagtaggcacttctcagccagccttgttcagtatctcctaagggctggcttgggacagcaccgtggaatcctggaggttcaaaaatccaagaactccacaaggaacagagaagtcgaaggggcagggctccagtcaccagcaggccccacgaggacaaaagatccatgaaccggggcccagagggcgctacagggccgtgcaggaagggttcccgcggcaccaaggaccctcaggccaacgcccacaggccagagctccgagggctgacaggtccaagggggcggggctggcctggctcccagcagcctccactgtttcaggatccagccagggtggagttctgggggccagaaattccaaagggctgggtgactggaagagagagtttagggacttgggtgggatggaccaggagggtcaggggtgcgggtggtgagcatctcacgatgctcagcgcttgaccctgcgtccggccgagttgcgcccgctgcggcggtagagggactgctggccaccgttaagcgggcagtacttgagcgtatgggcctggtcaccggtggccccgcacacgggacacacgtagtgcctcaggatgggacacaccaccacgccatccggtgtcttcagctggtgtgaggagtagacgtggcgggactccccgttgtgcttgcagaagttgcacagggtccccaggcccccgttggcccctggcgcccccagcccctgatcctgccccagcggaggcccgggacttggctcctcaatctcttgggtctccagcctttgaccccgacttgcgatcagcgcccacaccacctggctcaggttgaagtagtccttccacatgtcgaagggtggcagctgcatggcaccaaagcaggggtggtgggccacaggagaggggctggggctgggggcccgtgggcaagggcaagagcagcaggcgtttcccagagcagaagggagctgcatccccttttataacgcccagagactcttctaagtaaaggtggagcttaggatttaaagggctcactccctgcccataacccccatctgactttagttcttcacagagatgtggaaggaggtcattcccctgatctctggtcccagctctgctgccaaggtgctctgtgacctctgggaagacacttccattctctgtgcctcagtttccctatctgttcaaagaaagtccatgtctgcaaatatcccccacccctaggctggaggggctgcacccttcatagacttcagagttattcctaatcatcatagcagccaggctgggcgcagtgcctcacacctgtaatcctggcactttgggaggctgaggaaagaggatcgcttgagcccaggacctctaggccagcgtgggcaaaatagcgagaccttgtctctacaaaaaataaaaagacaaaaataataataacaacatgacctgatttattttatttatttatttacttgagacggagtcttgctatgtcgcccaggctggagtgcaatggcacgatctcagctcactgcaacctctgcctcctgggttcaagtgattctcctgcctcagcctcctgagtagctgggattacaggcgcccaccactaagcctggctaattttttttttttttttttttgtatttttagcagagacagggtttcaccatattggccaggctggtctcgaactcctgacctcaggtgatccacctgtctctgcctcccaaagcgctgggattacaggcgtgagccaccgcacccggcctagtattttcattttacagagaaagatatgaagcttggagaggttaaggaatgtatccaaggtcacacaacaaggaaatggcagagtcgggtttcataatcactctgggaactgggaattgatgttaaaagtggcagaggaacttggcacagaacaatctcacttagaatgccccctcttgggctaggcatgctggctcacgcctgtaatcctaatattttgggaggctgaggctagagaatcacttgaagccagaagtttgagaccagcctgggtaacatagtgagaccctgtttctacatataatacaaaatcagctgggcatggtggcatgtgcctgtaatcctagctagtgaggaggctgaggcaggaagatcacttgagcccaggaggtttaggcttcagtgagccatgattgtgccactgcagtccagcctgggctacagagtggaccctgtctttttttttatgagatggagtcttgctctgtcacccaagctgtagtgcagtggcacaatcttggcttactgcaatctccgcctcccaggttcaagtgattctcctgcctcagcctcacaagtagttgggattacaggtgcccaccaccacacctggctaattttttgtattagtagagatgggattttgacatgttggacaagctggtctggaactcctgacctcaggtgtgattcacctgcctcggtctcccaaagtgctgggattacaggcataagccactgcgtctggccaaccctgtctctctaaaaaaaaaaaaaaaatagccctttcttggccccatccattgtcttaaatccttcctggcctttggaacgagcaaaagcctcatctcccgcccaccgcacctggggttcttcttccacccacagtctccatgggccaccttgatattcaacacatagttactgaggctccatattgggtgctggaaattcagcagtgaccaaggctaccttatgcctgcttcatgaacgagttcaggagagcgaccagtaaatgagaaaacgctagactgtaaagacctgctggcctgtgaaccgggtgttctaagagtggctggctcaggaatgggacttggaagctgagaccactaagaagaatcttccaggaagaggaacacaggatatggaaactgtggctgggtgtggtggctcatgcctgtaatcccagcactttgagaggccgaggtgggtgggtcacctgaggtcaggagttcgagaccaacctggccaagatggtgaaaccacccccatctctactaaaaatacaaaaattagcaggatgggcacagtggctcacgcctgtaatcccagcactttgggaggctgaggtgggcggatcatgaggtcaggaggttgagaccagccttggcaacatggtgaaaccccgtctttcctaaaaatacaaaaattagctggcgtggtggcgggtgcctgtgatcccagctactcaggaggctgagacaggagaattgcttgaacctgggaggcggaggttgcagtgagctgagatcatgccattgcactccagcctgggtgacagagcgaggctccatctcaaaaaaaaaaaaaaaaagtaataaaaaataaaaaataaaataaaataaaataaaataaaataaaattagctgggcgcagtggtgggtgcctgtagtcccagctacttgggaggctgaggcaggaggattgcttgaatccagaaggtggaggttgcagtgagtcgagttagggccactgcactccagccagggtgacagagtgagaatccatctcaaaaaaaaaaaaaaaaaaaagacatcctgaaatttgggaacagcaagggggctggagtggctagaatggagtgaagatcccaggatgaagccagcatgatttgcagaggctggacaccctcagactctgcaaatctcccttagggcatgttttggaattggtgagggcgttttgagtttgtcaccgtgattggaggtgtggctggatttagtaggtggggaccagggatggcagatatctcgcagttcgcaccaccaagacctgttctgagccccacttaactttccagtgtcccactgaacacccatctaggtagaaaaacccatttataattatccaaattcagagcctagctatgttttatatataagcactaggtgctttttgcattattttaagataacactcatttttcctggaatgcaaccactgtgttcattctggtcttcaagctcttggtttttctgagaactttattcagttattcaccaattctagaagccacaacactcaaggcaatgctgcttgtggtatctgtctccaaacaacataccatttgtttgtatctcattcatggtgaatctacacagagaggctagtgtctgccctgctcagatgatttttggagtgtccatgcctgagcatttatacacttacatagacattattttattataaattactgtctttttattttccctttatattttggttaggacacgacacgatatccatttttgaaaataaaatttgtgactgggcacagtggctcacgcttgtaattccagcactctgggagaccaaggcaggcgggtcacttgaggtcaggagttccagaccagcctggccaacatggtgaaaccccgtttctactaaacatacaaaaattagccgggcgtggtggcacgcacctgtaaccccagttactctggaggctgaggcaggagaattgcttgaactcaggaggtggaggttgcagtgagctgagatagcaccactgcactccagcctgggcgacagagcaagactccatctcaggaaaaaaaaataataaaataaaataaaatttgtatgttggtgagctatattacctatgagtttaattttcaaggtcctaaagggtaattgcaaaatgttatctataatgttgggggtcctctcttggccccatccattgtcccaaattcccattcctgtaatcccagcactttgggaggttgaggcaggaggatcacttgagtccaggaggttgagaccagcctgggcagcatagtaagacctagtctctataaaaagtacaaagaagttaactggtgatgcatgcctatagtcccagctacttggaagcctgaggcaggaggattgcttgaacccaggaggctgagacttcagtgagctgtgttcgtgccactgcactccagcctgggtgacggagtgagacctcatctcgaaaaaaaaaaaaaaagatcatctatgaaatgaagacacaattgagacaataatcataggcacactcattactgagcatctgtgggctggcaccatgctcagggcccgacctgtgtcatctgtaaatcctcccagatcctgtcaaatagtctgttaatggtcctgttttacagatgagcaaagggagacttagaggggctcaggagcttttccaaagtcatatggacagtaagtgttagtctgggctgggcacagtggctcacacctgtaatcccagcactttgggaggctcaggcgggcagatcacttgtggtcaagagttagagaccagcctggccaacatggtgaaatccggtctctactaaaaatacaaaaattagccgggtgtggtggcgggtgcctgtaatccaagctacttgggagggtgaggcaggagaatcgcttgaacctgggaggtggaggttgcagtgagcccagatcgcaccactggactccagcctgggtgacagagcaagactctgcctcaaaaaaaaaaaaacaaaaaaaaacaccattaaaaataaaaataatgttaaaaaaaaaaaaggtgtttctccggagctgaaacccaagactgtttgaccccgaccttggacatcctcccaccccctgtagaaggagcacgcaaagcccgctgtgagcgaagaacctgcctaagaccccaagggaaagcagcagaccctgggggtcttgcagtgtgtagcgacagattgaggtgggaagccaggaaggatgggggtatttgagccaggtagcttttcagatacagagcagatgagacctgtcagccaccgatggacatactcaagagcagaagagactgtggtcggcagaatggaagaacagtactcctggggaggcaccacgacgggcatgggggtccctgtgctgagtgctttctgcaaagtcacagccttgactttcctcgtgggaggtgtgagttccctgtgtgtgcagggcctggacccagtaacccagtgacagtggttacagctgtggcatctgcgggatgtctgagaatgatgtaaggagaggccgttcccaggctccatggctccccttaacaattgcacctattgttcggagaaccccagatactgctggcttgggagtttttttttttttttctccttattgttttctccctaattgttttcttctaggattctgttatttgggccatggctgctttccaccccccaactccagtattattggatgagttgattgaaagataccccttatccttcttcagacaagctctctttccctggtgtggttgctgctctgagttaagggaacgggagatgatactgactagaaattcatcagccccggtgtttactacgtcctaacctccgcccccaccccaaggccacgaccgctgtctgctaacctgacgccaaggtgccctgtttatttgtgagtttccgtctccgcctgatgcctggcagaaaatagctcttgctgggggtccagagacgagtggggaggggaaagagttagaaaccccgagaaagtgtggggagaaacacgtaaatgggcagcagtgactcccagaaagaccgagggacccgctgcgagaccgagagacctgctcatgcggggaccaagacaggggagatgaagaccagggggagagagaccccgagggccagcgaggtcaccatcatcatcattgtcctcatggtctctgctgcgtgcttgcctgtgccatgtcattaaatccccagacagccttgtcaagtatcttgtaatatcctcatttcacagaacaggaaacaggcttggaggtgacatctgtcatggagtgattcagtgaggctggactgaaatccagatctggggctgggtgcggtggctcacccctgtaatcccagtacgggaggacgaagcaggagggtagcttgagcccaggagtttaaggccagcctgggcaatatagtgagacccccatctctaaaaaaaattaaaaattagctggacttggagtcatgcctgtagtctgagctacccagaaggctgaggtgggaagattgcttgagcccaggatgtcaagaagtgaccgtgccactacattccagtctgggcagacagagcaagatcctgtctctaaaaaaaaaaaaaaaatatatatatatatatatatatatatgttaaaattatatgttgtatatatttatatagttatatataagtaaatatatgctatttttatagaattatatgtgatttatatatatttatatttttatattacacataatatataacattaatatagtaatatatattcataaatatatttgcatttacaaaatactatatatcaacattgatgattaataatatattaataattatatatttataatatataaatattatcaatataatataaaaggtatatgggtacttatataaaatataagatattttatatcttatatataagatattaaatatcttatattttatatattaatatatattaatatatatatttatatcttaatatataatgttttatatttatatatttatatattcataaatttaaatatatatttataatttatatttatatatttattacatataaatatatattaatattaagacacatttattattaaaatatgtatttattaatatttatatatttatatgtgtatattttatatatttatgttatatttatactttttatatatttatatttcatatataatgtacaactgtaatatttatatattataaatttatatatataaatctatatataatataatatatatttatatataaaatataaatatataaaatatatagttatatacataatataaaaatataaaatacatttatatttgtttatattttattgaacatgaatatgataatgtatatcaaaattatatatataattggccaggcatggtggctcacgcctgtagtcccagcactttgggaggagaggcgggcagatcacctgaagtcgggagtttgagaccaacctgggtaacatggtgaaaccctgtctctactaaaaatacaaaaattagctgggcgtggtggtgggcgcctgtagtcccagctactcaggaggctgaggcacgagaatctcttgaacctgggaggtggaggttacagtgagcagagatcacaccactgcactccagcctgggtgacagagcgagactccctctcaaaaaaaaaagataatttaaaaaattatatatgtaattatatataagttaataattatatacatatacaataataagtgttatgtgtatttttcaggttgggctatgtgctatacagaagaaataaagggggcagtggttaggagcggccttttggaagaggtaccatttgagaagagtcttcacggatgtagaggagggagccttgttgatacgtggagacgtgcgacccagacagagggagcagccagtgcaaaggccctgaggttggaccatgactgggtgttcagggaggcgagtgtggctccagtggattgacagggagaatgggagggagtgagcgagaatgcaggacccggtgggccacagtaaggacattgggttgtgctttgagtgaggtgggagtgatgggcgggtctgagcagcagcggggaatgctttgactgaagatctagcaagatttctctaactgccctgtagggggacagacaatgggagttgagggcagaagctgagagcccagtgaggttaaggcaagaggtgatggtggctggactagagggaagggagagagaaagtgtcgaggagtggctgggtgttgattaccgcacagcagcagaatgagatttctaaaatataaatcagatcgtgtcactcctcttgcttaaaacttactctgattctctattatcctcagaataaagtcccaaaacattactgtgacctacaggctcctaggtgatatgtgtcccctcttctcaccttccctgggatctctatgatctcattttctattgcatttggctccagttgctcactcctctgtagccacccaggtgtcatttctctctctctctcttttttttttttttttttttttgagacagagtctctttctgtctcccaggctggagtgcagtggcgtgatctctgctcactgcaacctccgcctcccaggttcaagtgattcccctgcctcagcctccggagtagctaggattacagatgcctgccaccatgcccagctaatttttgtatttttagtagagacggggtttcaccatgttggccaggctcgtcttgaactcgtggcctcaagtgatccacctgcctcagcctcccaaagctgaggctaaagggtgagccgccatgtttttaaaaatatttgcctaaaaatgtttttaaaaacatttgctatatcatggactgaattgtgtctccccaaattcatatgttgaagccctaacacctaggaccttagaatgtgactatatttggatataggaccattattttgtatttatttatttattaaaaaaatttttttttgtagagatgcagtctcactgtattgcccaggctggtcttgaactcctagactcaagcgattcactggccttggcctcctaaagttctgggattacaggtgtcagccaccgcatctggagacagggcctttaaggaggtaatttaaaaggtggctgagtggggctcggtggctcacgcctgtaatcccagcactttgggaggccaaggcgggcagatcatgaggtcaggagttcgacaccagcttagccaatatggtgaaacccgtctctactaaaaacacaaaattggctgggcgtggtggcacacgcctgtagtctcagctacttgggaggctgaggtaggagaatcgcttgaacctgggaggcagagattgcagtgagctaagatcgccacgctgcactccagcctgagtgacagagcgagactccttctcaaaaaaatacaaataaaaaataaataaaaggagtctgttagggtggactctaatccaatctgactagtgtccttataagaagaggggattgatggtggctcatgcctgtaatcccagcactttgggaggccaaggtgggtggtcaggagatccagaccatcctggctaacatggtgaaaccctgtatctactaaaaatacaaaaaattacctgggcatggtggcgggcacctgtagtcccagctacttgggaggctgaggcaggagaatggcgtgaacccgggaggcggagcttgcagtgagccgagattgcgccactgcactccagcctgagcgacagagcgagactctgtctcaaaacaaacaaacaaacaaacaaacaaacaaacaaacaaagaagaggggattgaaacatacaaagagacactagacactctgtgcacagaggaaaggccatgtgaggacccagagagaaggcagcgatttgccaaggagagaggcctccgaagaaaccaaatctgttgacaccttgttcttgaactcctagcctccaaaattgtgaaaaaataaatctctcttgtttaaagtcacccagtttgtggtattttatggcagccgtaacaaactaatacaatatacattcttaaagttatttttgcaaggtataaaattctacattattccttctttccctgtgtacataagatatttaaaaatatataaaattctacattagacgttctgttctttcagcacattgaagatttcattttacactcctgtgatttctactggtgctgttgagaagtcaccatttagcctaacaaccttccatttcctcctgtggtcgctttaaatttttttttttttttttgggatggagtgttgctctgttgcccaggctggagtgcagtggtccgatctcggctcactgcaacctccaccttgcaggttcaagcaattctcctgcctcagcctcccgagtagctgagattacaggagcccaccaccacgcctggctaaattttctatttttagtagagacgagctttcacatattggccaggctggtctcgaattcctgacctcaggtgatctgcctgccttggcctcccaaagtcctgggattacaggcatgtttggaatctgctggcctcctctagttgtgatctggtgtctttcatcagttctggaaaaatttcaactactctctcttcagatctgatctctgtccccttctctctctcttttccttataggattgctaatttttgtttattttcagtggagatgaggttttgccatgttgcccaagctggtctcaaactcctagactcaagcttctcaacgtgctgtgattacaggtgtgagccaccatgactcatgactgttttaatactggtgtctgatctcccagcatctaaagtctgagccacaccttttctgttcttttgattcttattggtgtcatatttccctgtgacctgattatgtcggcctgatgattattgacctttgcattttttttttttttttttttttttttagtggagtctccctcttttgcccaggctggagtgcaggggcgtgatcttggctcgccacaacctccacctcctgggttcaagcgattctcctgcctcagtctccggagtagctgggattacaggtgcgtgctactacggctggctaatttttgtatttttagtagagacggagtttcaccatgttggccaggctggtctcgaactcccaacctcaagtcatccgcctgtctcggcctcccagagtgctgggattacaggtgtgagccaccgcgcccggccgacctttgcatttaactggggaatttcccctgggcctgagttgaatgcatggattccagggtctgtgtttgctttggttaggcacccctcagacacttccagttacagcctctccaaacatggttctggtttcttgttccttgactcatccagttatctacactgggggtgtcaacactgttcttgggccattctgaagccacaacttctcagggacttttttttcttccttatcccattctgctcagtgttgatgctgctacctttggagttgggacttggagttgggacagggacaggtttaggtctggctcgaactcactcagcagaaagcactttggggtcccagcttagtgaaaggagggtctttctttgcacttcctatctaagccaggccctggaggccacagtactgaaatccaatcatatgctcccagcaaacccgttgaagaaacaaccaccttttttgtgttcttctagccaccctgtttacactgcacattttacaggtgttatgtcctgtctttgcatttcatcagtgctttcttttaactttttatttggagagaattgtaaagtcacaagttgtcataataaataatggagatcttcgtgtcctttcctcagttttccctgatggtaacattttccacaactgtagtacaataccacaaccaagatatagacatcgatacaatccactgatgttgttcagattttacacttatttgtactcatttgtgtgtgtgtacttgttttttgtttgtttgtttgtttgttttttgagagagagtctcgctctgtctccaggctggagtgcagtggcacgatctcggctcactgcaacctccacctcctgggttcaagcgattctcctgcctcagcttcctgagtagctgggattacaggcgcctgccaccgcgctctgctaatttctgtattgtcagtagagacagggtttcaccatcttggccaggctagtcttgaactcctgacctcgtgatccacccgccttggcctcccaaagtgctgggattacaggcgtgagccactgcgcccggccaataaatgtatttttttaaatgactaggtacctcctgagaaggatgcagctccatttccctacagttggaagctcattggttaagagaaagaacagtgaagagaaaatggggttgagatggccgcagctttctggagagtaaagctgagtggtcaattacttctggccaactgagggccctactctgctccaaaccgaaaccataatcccccactgtggccactccaactctagccagtaactcaccggtctctttcggttcacgttgcctacctggaggtgcttgatctttccacctgcagggagagcagctgagaaatgccaaagcatgggtcctgttcctggcttgtctgtggaactacgggacacccatgtcttacctctccctcctcttcttccttagggatctgagcttctggttcagctgagagtggggtgaaggtcaagagggagatccccgatagtaaggttggaactgaggatgaggataatggtgaggcagggggctatgagaattggcactggtcatacaggtggtgaccaagaaaaaggacagagaaggccatagagatggaagaattgaaataaaacgagcgtgggggccaggcacggtggctcgcctgtaatgccagcactttgggaggccgaggcaggtggatcacctgaggtcgggagttcgagaccagcctggccaacgtggcaaaaccccatctctactaaaaatacaaaaattagccgggcgtggtggtgggtgcctgtagtcccagctactcgggaggctgaggcaggagaatcgcggaggttgcactgagccgagatcgcgccattgcaccccagtctgggcgacagagcgagactctgtctcaaactaaacaaaaacaaaaacaaattctggagagtgaaaaagatgggggggaaaatcaaaccaaggagacagaacacacacgaagacagcaagtgagattatacatgcacgtaaaaacagagatggacagagagagagggcgtgcaaccacgtggaggaggtgtggcgcctctcaacatctattccactctcctagcgcaccttcctgcgactgcagcggctggagggctcaaaactacgtttcccagaatgccttgtggctgcgcatgtggccggaggttaggttccaccaatcaggtgcctccgcgggaagcttgaatttcttaccgaagtaagctgggcgagaggcagcccgaaggccagtgcagatcccggcgagaggctgcggcggtggagccggctggcggcttcctgatcgcgcaggaggagcagcggttcctggacggccctttctgagcgctggatttgagaatgccctggaggctcagcctagattctgtttcttctgagaggctctgtgtcccttaataagtcctttttgcttacactgtcccaagtgaattctgttcgcgcctctgagcaacgatgggtacacagacagggagaaatagatgcagacacggacagagacagggaaagtgattcagggagacacacagagaccccatccctgcgaagagacaaggagaaagacaattctgcagaagtggggtggagatgcaggaaaaaaaatcaatgggagaaggaagacctggttagacagacactcagagaaatacggaagataacaggcagagaggagtgagaggcaagggcaggtgggccagaaacagggacacggagacctcaccagaatgctggcgtgaaggtgttggttgagaggcctcattttaaatatttatttatttatttatttagggacggactctcggtctgtcgcccaggctggagtgtagtggcgcaatctcccctcactgcaacctccacctccgggttcagcaattctcctgcctcagcctcccgagtagctgggattacaagcatctgccatctcgcctggctaatttttgtattattagtagagacggggtttcaccatgttggccaggctggtctcgaactcctgacctcaggtgatccgcccacctcggcctcccaaagtgccgggattacaggtgtgagccaccgcgcccggccggagaggcctctttagagaacagacttctctgaaggcatggcagttgaaggcaggagaatggaggggactttggagaaatctctgacttgctagactctctgattttggtggcagcgagcatttgcctggcagaacgtctctttgtcccagcacctattcccagcccaaagcttcatcagctctgactgcggagggggtagtgcccctgaaagtgtttcccattctccatcacttgcccctgaggccttgtcccccaaaaccagcccccacttgacagcttggtaggagtgagaacagtgactcaactggttttaatgtgtgaggcagattccaggagtagtgactgactgaggaactaagaggagttgggggtggcgggagggacagaaggactgcaaaacagggacaccaacgaaaaaagagagggaaacgtagggacagaaagcagggagcgtgtgaggcagggaaagtggagactgagaaactaggggcagagagagggagggatccaggggctgagagaggggacagaggggagacagaggtggggggcagagggacagagaggaggggcagaggagggggacagaaagacagagagggggaggatgaacagagagaaggagacagaaggacagagagagggagacagagggacaggggggacagagggacaggatggggagcagagggacagagggagggaggatggaggaacatagagaggggacagagagatggggggcacagagggacagagaagggtgacagaagggcagagaggaaagggatacaggagttacgggcagtaagctgggcatgccccagttgggattccagatggtggacgcctcggctcctttaaccagttctcctggctttttttgttgcccctcagatttctttttgttttcctccacctaaggttgccaggtaaaatacaggatgcccagtttcatttgaattttagataagcaacaattcatattgtagcatacgtattgcccacatattgcatgggacatttttacacttttttttttttttgagatggaattccactctgtcacccaggctggagtgccatggtttgatctcagctcattgcaacctctgcttcttgggttcaaacgattctcctgcctcagtatcccaagtagctggaagtacaggcgtgtgccaccacgcccggctaatttttgtatttttagtagagatgggggtttcaccatgttggccaggctggtctcaaactcctgacttcaggtgatctgcctgcctccacctcccaaattgctgggattataggtgtgagccaccgcgcccggcctaaaaagttcttttaatctgaaattcaaatgccactggacacacagtatttttatttgctaaaccttggcaaccttatctccgtcactttccagtttctgcctctttttcattttctatttgtgtgtgcctgcctctccctctcttctagttcatctccaccatctctattctccttcctctgttttttatttttgtttgagacagggtcttcctctgttacccaggctggagtgcagtggtgtgatctcactgcaaactgcctccagggatcaagcgatccttccacctcagcctcccaaggagctgggactacaggcacgcaccaccacacctagctaacttttatgttttttgtagaaacagggtttcgtcatgttgtccaggatggcctcaaactcctgagctcacgagattctcccacctctgcctcccaaagtgctgggattacaggcatgagccactgcgcctggcctccccgtcccctcttaatgacctggctcctctcatgtgtagagacctctcttgagacacccccaccaggtccctgcctaggccccttcctccctccttcccccttcccagccctctttctagggctgtctctgtgctccaggcaacttctctgtcttctttctccatctctcttctcattcagatcccccacctttgcaattctctctatactcccctcaccccctgcccagaggagaaggtttgggggctttgagggagctaggaatctcccattactcaccttcatcctgacctcatctcctttcctttccatttcctgggccagagacatcatgagggttttccaaagccacacagcagaacagaaacacccgccctgtccctccaaatcccttccaatttcccagcttcttggtggaaaattcctttactcttcctgaaaatggcctggcttggcaatgtttctgaataccaggcaatgcttgagggtcacaggccaggaccagaggcgcctgtggctcatgggatggtagacttttggacacctactatgtgctgagagtgagggatatggcctgtgggctgtaaatacaacaacagtgatgtgtcctgggcatcaccatatccctaggcccagaacacagtaggtgttcaataaatacctgttgaatgaacgaatgaatgagtggatggacacatccccagcaggtggagcctcatctccatgtctgccctcctcttcatccctatcgctcttgcttactttatcctagcctgagtcccccttcttccatccccctctgttgggcttgtccttttctggagtcctgttattgttatttttatcagctggagggggtctctggtgactaccatgcgctgagcgttttctctatgtcaggtactgaaggggtgagtgacatgtagaatccttctggaatattccagaaggcaagtacagctttctagggcgttttccagatgtggaaattgggagccagggagaggaagagaaagtgccttgggtcacaccagaatccaagcgtctggcctcaccccacccagcctccttggccttggtctcttgtttctctgtcattatctgccaagctgcatctctgacacctccaaaatgtaaggcaattacttatctttttttttttttttatgagacagggtcttgctctgttgcccaggctggagtgcagtggtgcaatcacagctcactgcagcctcgacctctcaggctcaagcgatcctcctgcctcagcctcccgagtagctgggactataggcatgtaccaacacacctggctaattttgaagttttttgtgagacagagtctcaaactcctgggctcaagcgattctcctgccatggcttcccaaagtgctgggattacaggtgtgagccaccacatccagtcaggcaatttttttttttttttttttgagacggagtctcgctctgttgcccaagctggagtgcagtggtgcgatcttggctcactgcagcctccgcttcctgggttccagtgattctcctgcctcagtgttctgagtagctgggattacagccacctgccaccatgtccagctaatttttgtatttttagtaaagaaatggtttcaccatgttggctggtctcgaactcctgacctcaagtgatccgcctgcctcagcctcccaaattgctgggattacaggtgtgagccaccacacccagccaggctagtaatttttaaatatttgctcaggggttgcaaacgtccagagcctaggcatgtgagataaatgagcagtgccggtcaggaaggggctaagcctctctgccctgggtgagtggcagtggctgccccaggccagcccattatgggcaggtggcaattgcaatcaaagctatcacatggcatttctcaagagggtcttgaaacccatgttttcaaaagtctcccaatgtttaaatgctggcaacaattccacaaaacactgtttgggtcaaatgaaattatgggtaccgcacctgcctgttggccgatggtttgcaacctctgaattcatttgagtcccacgtgtcaggttttgtgttaagaagaatttcccaattccagtagactgtatgctccaaaaagccagagatacctgggtctgttttgttcattgctttatcttcagcacctagaacagtgccttatgcatcataggtcttcagtaatcatttttaaaaaagtgaatagtgtatcgatccaagcataagccatatgatgtagaaataacaatttaaaaaatccccatgttacagatggggacctgaaggctcagaggagcaaaggactgagggtaacacagcagcacggggatctaaacccatagctcacctgactcgaaaacctccaccttggcctatcctgattctacctggcgttgtgtatttgcagggctgtgtgtggggatgtgcgtccaagacaaaagcctgtttgtgggactgtggctctgcatatgtgtgtggtggtggtggtgtcggttctcctgactggacactgaggccctggaagctacattttttttttttttgagacagtcttgctttgttgcccaagctggagtgcaatggtgcgatcttggcttactgcaacttccgtctcccaggtttaagcaattctcctgcctcagcctcccaagtagctgggactataggcgcgtgccaccatgcctagctaattttttgtattttagtagagactgggtttcaccatgttggccaggctggtatcgaactcctgagctcaggtgatctgcccgcctcggcctcccaaagtgctgggattacaggcgtgagccactgcgcccggcctctggaagctaaacttgagcacctgcttctcttcaatcacagttactccggatgctcaccccgtccagagagaacagtcctccctccccagctcccccatctgggaccatcctcaggggtccccccaccctcttcccctaaatgcccagagccctgggggaaagggggaaagaatttaggatgagggtggaggtgcagggaggagggagagggaaggggatgggttaagaaggagtgtgtgatgtcaagcaaaaaagacaacattagacacagatgctgagatggcgtttatcgcggcaaaaaaaggtgaagtcgccgaggggaaaggggtggggaaagggggtgtggtgggggctggggtgggggccatggaagctaatacatggtgcactaggtcacacaacggacactgggggtgggtgagtgggtggggtgggcgtggcccaggcatggcaatgtggggagtgggaggagacggcagtgcaccccagccaggagcttctggaggtggtgggcaggaggcgggcggcgtctctggtcgcagaggatggaaggaatcagttagagggggttgaatggaggcactggaggcatggccacattccaagaaatggaatgaaggagtgggacagcaggcagggggccagcctggggcctgggccttttaatctaaggactggggagaaccaagggaccttagaggtcctccagtcctccccatattccaagagggagaacaagcctggagaggaggctaccttaaggtcctaagaaggatttagcaatcggttctccaaagatggccctgcagcctcccctgtcccccattcttctgctaccctgtctccaacagagaaagggggaagagaggttctagctcctctgactccaccattatctcactgaggctcctcagggaaattggaggatgaatccatttcacagaaggggaaaacggaggcatcctcccagactacacctttccacacctctcccaccaccctgccggggaatctatgcaccccatccctctagagtaatactgatagcttgaaatccttagcgatggggacaggtgaggggacataccttaaaattctcccaaatcgacccgggatgtgggccatgcctccagtggcctgagatgccaacataaagaaaagaaaaatgactccccacgtcccctggctcaaacccagtacaaaagtgactatttacaatgaaggcgtggggagtgtgtggggggcacacgaaggagggggtcagagtgagcgctccatttgagggaggccacgcccctggacccgccttttaaagggacaaagccaaatagcatagatatttatagaggatgtcaatccccagggtggggcagaccctaggggtgagggatgggggtggggcatgggatggggtgcgggtggggaggcatgggtggtgggaggagatggaggaaaggtagcaactgcccctagcctcccccctcccccctgccggacacacagttttccgtgggatgaacacagaaagggttaatcaaaaagagttcgatgagcgagtctgacggtcgagtggggcgggctggagcaatgaggccgcaggtcccggtggccggtggtgatggagtcacttagaagatgagaggttggtggttttggggggagaggtggggtagggaaaggggtgggggagggggggttaggcagtccccccccagttatctctgggagacaagtgtcctggactggttgagaagggattaaaaaccagcagccttcaccaccatgaccccacagattctcttcccatttccctccctgccacccagcaatctccaatgcaacttgcaggggacactaagacagaccatacacaccagcagtggcgcccggagacaagccctctccaaccacggcgtggagacagctgaccacagtgcaaacggatcgcgatagcagggctgggtgttatcaccccagtaaaccagtgtccctggctcgcctgtgccccagcttgggtatcgcgatcccgttctccccatcgtgacatccagtccaggctttcaggacagcgagcccggtttccaggcaggtgcttgtcgaaggcctggctggctgtaccgacaggcgggcactcagtcagcagcctggacgccccaactgccatcctcatcgccactcttgttaatacttttgccactgcacagtctatcacagcctctaatcccggtcctgaaacagcaatcatccattcagggggactcctctcattttccaaacaattggccaccaatcaaaacaaagtaagaaggaggatgtgggatggaggaacagggaggagaaacagaatgaggggatattgaaggatttggtggtccagaggggagaggaaatacacctcggagataagcgacaccctggtgttccaagtagaggtccccaaccatctataggtcggcttttatcaacatccacttgggatacccataattcccaactacaagtccagggtaggcgttagggcagatagaaacggcaaaatcattgtcttctgatcaccacccctactaattattgcagtgaagcctccttgcccatgtagaggtggctgggacagggcagaagaaggtggctgggcaggttggctcagagccccctgagatgggggatgaaggaggttaatttggcacatcgaaccccctcttctcataggagctttgaggtccttctcttgaatccagttggtaccgccccttgggctagcagaggaggagttgagcttgtctcctcctccccagtttccatagatttgccaggaagttggcaagtgggattctccttggctggtggaatttggggggacccaaaaggataggggtaagttgaaaaggagagcttttttctgtctttttttttttttcttacaaagattctaagaaaaactcagggtgggagggctgtggaagggggacccaatttagctccatgtccacacttttgcaatgcctcttagggacctcctcaaagagaaatggtcccatttcctcccctctatccaaggtcctctccccccagagcggctcagttccaaggaagtttggcacttttttttttttttaaatggggaaattggggagagagagttgagacatttgaggaaaggaggaagacagacaaagactaagatagagacaggacagaaaacaatgggaaccacacggaggaaaaaaaaatagaaagtcatagggagccagacaaagaaagggaggaagacacttggagaaggtatgggaagctagagggcaaatgagaaggaatagggagataatccaatgcagcaaacacttattaagcacctactgggtgctgaagagaagggtgcaaggaggccactcagagactctgagatcggattggctaatagggagacggggaaaaaaaaagagatgatgggtttttcaataatcctcatccctgaccccacatctgtgtcccctctggacaaactgcagcacaaaagattgaggtcagattgcagaagggactttcaagagatggcaaagatggtggagtgagtttcccaaggtaaaatggggaaaggtgtggctctctgctcaccaacatggtgagtgaactagctcactgagctagcaaagtatacctttcagatcaccctggctggctgggtagggggtccccaagaaatatgaatagggaggggttgttacacagacaccccaagcaaacacttttcaggaggcccagcctccggagatgtgtctgtgtgagaggagtcctggacccggctgattgggacccagactccagtgaatgagtttgtagaaagcggctgccaagcggaggatgcaaatgatatgcaaatgagttcattcagatcccacctccccagtcccagaccttacttcactctccctggctccttcccttcctcatagggtcctggggggctgtagggggatattccagctagatactgtaatactcgcgtgcgggtagagatactgtgaaatactgtaaggtcttttgagaggtggaggggagcaatggcccacagagccgcccccacctctaaccccaagagcccccaacggtagtagaagatatgtacaaagttacatcaagaattgttttggcactcagatctccatctgggttcagtctggagattaggggtggggcaacaacaatgggaagtgggggataggggaggggaagtggggcctgcctcccaccctggagatgacaagggcatggaaaaagtcaccccagtgcccaagttacagcctcccatcgggtggaagggctggggtgggaaattcagtgcaaggtacctcgaaggctattgctttctagggattttcacattttgatttgggggtggctctctagcaagggagagggatctcctaggctttaggggcaggaattgtctctgtggcttttcttccctccttttttaggagagagacaaggaggctggatttcccccaaagtcatagagaagaaaagggtttggaagacctaggaggcggacaaatgggggagagggtgggcatggggcgcccctcccccagagatgctgatgatggaaccagggcactgggcgccctgctttgggttggagaaagtggaggtggtctccaaggaagagagggagatgggtgggggtagagggaggtctcagctatcctagtctacatggttgtcaggccctgaaatctcagtctgccaacaggtccttagagctgaccacagccacagcactcagggagccactcctaaaccaactctcaaggccgcctggcttgtcagactccatcagaacattctagttctccagagcccctggtgagcacaccaaaacattctgatccatcagacatcaccgaagtatgccagcttgctggaagccaccaaaccaatctaacctatcagaccacacgaagcattctggcccaagggaccctactatggctcactgaactctacacctggccatactggcctgacagagccaccacacacttggctcacccgattcaatgaaacaaagccacgcagacacaggcatgcacacaaaaggcaggggtgggaagggaggtctttaacagtagtttgcactaggtccatctcccacccctccctccagggcgagttcgcagacttgacgtgtttgaatggagatgaccctgacaatattggtttttttccgttagagtcctccagattggatccaagtcccgtgccttattctcttcctaggaagacccccaggccaacacccaccaaagaagggtgtggagggagaaggcaggtcagagactggtcactgtccaatacaggaagtacatgcttcagcctaatgacatcacaggacgtgacctctaggcatcaccggaagtacaccttcccatgatatcaccaaagtgaccttcaaggaagaactcattgagacatcacaggaagtacctgctcccttatgttcacaggaagtaacctctgaggaactgcttcctgtgacatcataaggggtgcccagaagcaccccagaaagtactcagtgacatcacaacagagaccctcattgccattactctaagccatcagagataccacaccaagttgatccagcctcttgcaagtcttgcccacaggactggcccaatcccagagctggcatccttcccagcagcactgtccctgcccccccatacaacctgacaacaaaagagtgaacattcccacctaggagggacagctccagtgggaggagagtagctgagaagatctgggaactctggggtccttgctccaaatgccccatttcagctcagacgcctctgctacctctactcccatggcttccctcagatctagaactgaaagcagagaggtggggtgttgtgttttgggaaggcccctcattctgggtgacccagaggctccctcccctcctcccatatggaaacaaaaacttataaagggggaaaaaatccttaccaaaaaaaaaaaaaaaaaaaaaaaggagggaaagaaagagaaaataacgctttgttttctattaaaatcaacaaaatgcaatatatacagatatcacacagacctgggccctgggacaggaagggtcaggcccagccaagcacagggagggaggaaggaggggtcagttccgggctggggagggggcttctgagcccccttcccaaccgtcactcaatcctgcctatgactaccagaaggggagggtgcagtcgggcctaccccagccccatcccaagaggagcaggactacaccaagctgaggtcaggagttgggggggaggaggagagggaagaggaggagatgggaggagagaaaagggtgggagcacacaccacaggcctcatcccactttctgggggtttgaggccctcactccctgctcgtaggtgacccgctgactgatgaggtattgagcggcttgcgtggccgcggggctgcccgtgatggtgacccgccggttccgcgtgcctggcaggaactcgcccttcttggagatctggatgcgagcgcccgtcagctcctggtactccaccaacgtcttgccccccttccccaggatggctcccaccaggttctcaggcaccgcaatctccaccagctccttggcactctcagccgccagcttctccgccgtcaggaagcccccggccgccccggccgcggctgcagcggccaccagcgggccgccccctccgcccgccccgccgcccgccccggccccgaggtagccgttggcggctgcggccaacgcaaaggaccccagggctccgggaggcgggggcggcggcggggcggcccctccggctggcccggccccggcctcgcccgcgtaggatgccaggaggttggcggcggcggcggctgctgggttggccccggcggccacggcggccaggacgccggaagctgcggccgagttgaggcccaggcccagggagttggtgttgtagccgtaacttgccagcgtgttaagcgccgtgctgatggccagcaggtcggtgcctgagaaggcgggcagcgcggcgggaaaggcccccacgccagccagcccggcggggcccagcaggccggaggcggcggcggccgacgctgcggccgcggctggcagcacatccgcggggctggcgtacggagagccggtggggttggagttggccacggggcctgccacgttggcgtagctgatgttgaggcagctgctgctctgggggtcttcttgtaccttctgcacgatggcgctcacggccttgtgcacctgctcgggctcgccgctgaccgtcaccacgcgctcctgcaggttgatgccctccggcttctgggacagctgcacccatgctcctgactgttccatcacggctttcaccgtggcgcctcccttgccgatgatcaggcccgccgtgctgttggggacgatcagcttggcctgcgtggggagcaaaagggagggtctttaattttatttttttaaaaaattaaattaaattaggctgggcacggtggctgtcgcctgtaatcccagcactttggggggctgaggcaggcagattacttgaggtcaggagttccagactagcctggccaacatggtgaaactccgtctctagtaaaaatccaaaaattagccagctgtgtgttggcacatgcctgtaatcccagctactcaggaggctgaggcaggagaatcgcttgaacccaggagagggaggatgcagtgagctgagctcgtgccaaattgcactccagcctgagtgacagagggagaccctgtctcaaaataaaataaaataatatatatatatatatatataattttgtctatctatattagtagagatggggccttgcgatgttgcccaggctggtcttgaactcttggcctcaagggatctcctgccttagcctcctaaagtgttggaattacagatttgagccaccaaactggcgaagggagggtctttacggtggctggagactgagacgccccaggtcattccctacccctcctctccagcatccaaaatcaggcccagcatggccttttgatatgcaccagtatggtccaactggttgttaaaaatattgaaatatttcaggtcaggtgcaatggctcaggcctgtaatcccagcactttgacaggctgaggtgggaggataacttgagcccaggagtttgagaccagcctgggcaacatagcgagatcttgcctctaacattaaaattttttttaaaaaaattgaaatatatccacaatggttggttaatgaatagccagtatttgaggtcccctcagtagcccctcaaccaccctgtcccatgtacctgggactcttagtacttcctctgcgtccagcatctaaaagcttaatggctaatccaatggggccctccaggatctcactccaagcttgcacaatggcccacccatgccttctagtgttacgtactctgacttccagccctggaaaagccttcattaagccttactttacagatgagcctcttgaggcccaagaggtgaaaggacttgtcctaaggttccccagttagtgacggagctgaaatctaggctcttgggttcctgatccattgtgctcccctagacatggtcttctcgttgaactctctgttgttatgggctgacactgtgtccccttcaaattcatatgttgaaggcgtaacttccagtactttagaatttgactatatttggagagagggtctttaaagagataattaaggtaaaatggggtcattagggcgggccctaatttactgactggtgtccttataagcagaggagattaggacacagatgcacacagagggaagactgtgtgaagacacagggagaagaaggtctaggagagaggcctcagaagaaaccaaccctgctgacaccttgatcttggacttctggcctccagaatcatgagatataaatacctgttgtttagaccacccagtctctggcactttgttatggcagccctagcagactaatctagttgtcctgtctgtaaaatgaagataacatgaaggcttttgtctgagaaggcagacgtaagtggatgtcttggatgtcacacaatggatcgggaacccaagaatctagatttcaatctccttctaattcctgggacgggaactctccaggatgaagaagttggtcatttgaatctggtgacctctcctttctcagttgcagagcagccatccttcaaccacccatttgtccaagcatctgcaagtctgatcaatcttaattcctgtggagacatttcaaaaccagtcatgtccttttgcacctccgagagcatttctacacataaattcctccctctcaaaaatccttcccatgtccccttaaaccctgggggtgtctgagaaatttgtgggggtggtggttttggttgttgcaaggactgggggaagatgtggactgtcagtggggaggaccataggtgtctgtaccccacaatggagagtcagtccctcacaagaaagagctgtcccaggccctatatgtctacttttttttttttttttttgagacggagtctcactgtgtcacccaggctggtacacagtggtgcgatctcggctcactgcaatctccacctcctgggttcaagggattctgccacctcagcctccctagtagctgggattacaggcgcccaccaccatgcccagctaatttttttgtatttttagtagagacagggtttcaccatgttggccaggccagtctcgaactcctggcctcaagtgatccagccacctcagcctcccaaagtgctgggattacaggtgtgagccaccgcacccagacactatatgactacttttgaatgtcctgttggacattcatgctgatgaagagcctgtttttaaatctctgagcccacgtctgggcacggtggctcacgcctgtaatcccagcacctcgggaggccaaggtgggaggatcacttgagcccaggagttgtagacctgcctgggtaacatggcatgaccccatctctacaaaaaaaaaattaaaaacattagctggcctggtggcacatgcctgtagtcccagctactcaggaggctaaggtgggaggatcacttgagcctgggaggtataggctacagtgagctgtaattgtgccactgcacttcaacctgggcaacacagtgaaaccctgactcaaaaaaaaaaaaaagtctctgagcccagaacccaactgacacagtgagaccctatcccccccaaaataaataagtaaataaaaataacaaaataaaaaaaatctctgagctcagagcccaaccccatgacacatgtaagtaccaagtattgtttgcatggttttaagagctactgaaatttccaggaacgcaactaccagtaaatcaagagcagattgtgctttgttttgctctgcacttcactaaaagttttcatcattttagaaaacctggcgtcagtagcaacagcatttgtattatttaagtctccagtattatactctggatcactttacatatgtagttgtctcacttagctatgcttaggtgtgagcagctgcctaattcattattccttctattgtggtcctgactatttatttacatattaaaattcaccttggctgggtgcagtgactcacacctgtaatcccggcactttgggaagctgaggcagggtgaatcacttgagcccaggagttcaagaccagcctgggcatcatgatgaaaacctgtctctagtaaaaatacaaaaaatagccaggtgtggtggcatctgcctgtggtcccagctacttgggaggctgaggtgggaggatcacttgagcccaggaggttgaggctgcagtgagctgtgattgtgccactgtactccagcctgggcaacagagcagaccctgtttcaaaaacaaaacaaaacaaaaaacaaaaacaacaacaaagaagcaaaaaataaaattcatcttgttttataacaaatcaccttccttttatttcttctttatttaaaaaagtctcgtgggataaataaaacatggtatatccatacaatggaatattacttggcaatacgttgaatgaacaaagtactgatacatgctatagcgtggatgaatctagaaaaaattatgctaagtgaaagaagccagttacaaaagaccacagctgagttcatttacataaatgtccagaatatgcagatccacagagccaaaaaggtagattagtggttgccagggaatgggaggaaggggattgggggtaactgcctacaggcataggatttcttttgggtaatagatactttctggaattagaaagtgttgatggttgaccatatactgtgtgattccttttacagaaatgtccagaataggcaaatctatagacacagaaagtagatttgtggtggcttggggttagggagagggtgagctgaggtgggagatcgaggggtcatagctaagatgatcaagatttcttttggaggccaggctcggtggcttatgcctgtaatccagcactttgggaggcagaggccagagactgcttgagcccaggaattagagatcaacctgggcaagatggtgaaacctcatctctacaaaaaataaaaataaattagctggatgcagtggtgtgcacctgtcgtctcagctactcaggagtctaagggatcacttgagcccaggagtttgaggctgcagtgagctataacaggtgccactacactccagcctgggtgacagtgcaagaccctgcctctaaaaaaagaaagaaagaaaaaaaaaaggatttattttgaaggcagtgcaaatgtttgaaaatggattgtggcaataggtgtacaactatgtgactataataaaagccaatgaactgtacactttatttatcatgtattttatgtttctctttttttaaatagggtcttgctctgatacccaggctggagtgcagtggtgtgatcagagctcactgcagccttgtacttctgggctcaagtgatcctccggcctcggcctcctaaagtgctgggattacaggcatgagcccccatactgggcctagagccgtgtaccttaaaagggtgagttgtatgtgaattatatctcaataaagctgtcaaaaagtcttacgggtgtagatatgtctatatgtgtatatatgaatatgaatagtatttcagagagtcaagtgaacatgacaaaatatttgtaggagaaagggggtgttgctgtgacagagctccccatgctctattccctgttggtctccctgactttattattattattattattttttttttttttgagacacagtcttgctctgtcacccaggctatggtgcagtggcatcatctcagctcaatgcaacctccacctcctgggttcaagtgattctcaagtgagccgagatcatgccactgccctccagcctgaatgacagagtgagactccatctaaaaaaaaaaaaaaaaaaaggccaggcatggtggctcatgcctgtaatcccagcactttgggacgctgaggtgggcagatcgcttgagctcacaagttgtacagcctggacaacatggcaaaacctcatttctacaaaaagtacaaaaattaactgagtgtggtggtgcatgcctgtagtcccagctacttgggagtctgagaagggaggatggcttgagcccaagaggtggaggttgaagtgagccaaaatggcatcactacactccagtctgggtgatcgagccagaccttgtgaacaagaaaaaggaatcttcatttattctagagtaaaagagactaatgaggtgtaacaatcaaatgcaaagcacgaatgttgactgaatctcagattgaaaaatcctctatagctataaaagatattttagggcaatttgaatatggactttccaatgagacaatagtatagaattagcatttttgtttgtttgtttttgtttttaggtgtgttgacagtaatacaataatgtaggagattgtccttggaagatacatgttaaagtacttaggagtaaagagtcatgaggtcagccaggcacggtggctcacgcctgtaatcccagcgctttgggaggccaaggcgggcggatcacgaggtcaggagatcgagaccatcctggctaacatggtgaaaccccatttctatgaaaaatacaaaaattagccaggcgtggtggcacacgcctgtagttccagctacttgggaggctgagacaggagaattgcttgaacctgggaggcggaggttgcagcgagccgagatcatcgcaccactgcattccagcctggtgagtgagcaagactccgtctaaaaaaaaaaaaaaaaaaatcacaacaaaaattgtgtgtgcgcacgcgcatgtacacacatgcatgcacatgtgttcatgcatgcacaaatgttaacaactggtgaatctaagtgcagtgtatggggactattccttaaacattttcaaaataaaaaggaaaaaaatctatgccctaacattcccttttcctcttctccgctttatttttcttcatagtatttttcactctctaacatcctctatattttacttatctccttgtttattttgtgtttctctgtaaaagaatttcaaatccacgaggttagagatttttgcctgtattattactgctgggttctcagcgcctagaaaagtgcctggaacacagtagatactcagcaaagggtgagcgaataaatagacggatgaagactgaaggatgacacgcccacaggcccaagcaggaaggcgaatgggtggaggcagcaggtgtatcttacctggtgggggtggggagtggtagagtactatgcaattgggcagccaaactaagcctgatggacattttccagatgagttggaaatgctgatttgtaaaatgtgaagcaccctagttttttttttttcttttttttgagacggagtttcgctcttttgcccaggctagagtgcagtggcgcaatctcagctcactgcaacctccgtcttccagtttcaagcgattctcctgcctcagcctcccgagtagctaggattacaggcacccaccaccacgcccggctaatttttgtatttttagtagcgatggggttttaacatgttagccaggctcgttttgaactcctgacctcgtgatccgcctgtctcagcctcccaaagtactgggattacaggcctgagccaccacacctggccagcatcctagtttttaaatgttggcaatctcttaaaaatgtctaagatttgtgtagtagaaacaatgcaatgtactagccaggctacccatttgcagtctgtgcatacaaatccctgaaaagctgccttggactctggagtcacctgcttgggtttaaatcctggctccctgtctgatgctgggcaagggacctaacctctttgagactcagttttctcatctgtaaaacaaggatattcagacctcctcataggactatgatgaagcttaattgagcttatgcatgtaatggtgagcttgaaatccaagcatgaccacaagtagctggaactgagagtgagtgcccttcaggtgactcacaactgctaccattggcagattacacctcagtccctatgtttctgcttggccctgtgggtgaagtcatcacctattcattcaaataagtgacatgtgctgagcacctactatgtgccaagcatagggcatcatgtatgtgtgcaattaatataagccatagaagcactcaagaaatgattattgtcagccgggcgtgggggctcatgcctgtaatcccagaactttgggaggccaaggtgggcggatcacggggtcaggagatcaagaccattctggctaacacggtgaaaccccgtctctactaaaaatacaaaaaaattagccaggtgtggtggcgggtgcctgtagtcccagctactcgggaggctgaggcaggagaatggcgtgaacccgggagggggagcttgcagtgagccgagattgcgccattgcactccagcctgggggacggagggagactctgtctcaaaaaaaaaaaaaaaaagaaaaaagaaaagaaaagaaaaagaaatgattattgtcattgttatccccatggatggagctggatttaaatcccacatctgcggtacagctattatggaaaccagtctggcagttcttcaaaaagttgaacatagatttatcatatgtcccaacaattccaccctaggtatctacccgagagctggaaatatatatctacaaaaagacttgtacatgaatgttcagaagcattactcatcatagctaaaaaggagaaacaacccaaatgtctatcaactgatgaacagacaagcaaaatgtggtctatgcatacaatgaaacattatttgtctataaaaaggagtaaagttttgacacatgctaaactatagataaacctcgaaagtattacatcaagtgaaaaaagctagacacaaaagaccatatattatatgattctgtttatataaaagatccagaataggcaagtccacagagaccaaaagtagattagtggctggaagacgttgagactgggatctgggggaatggtgagtgactgctcatgggcacaaggtttctttttggcatgatgaaaatgttctggaattagatggtaactgatgtacgactctgtgaacatacaacaaaactactaaactgtacacttctaaacagtaaagcttacagtatgtgaattatagctcaacagagctgttatttcaaaaaaaaaaaaaaaaaaacaccaggaaaaacaaacagcctgacaaatcaagaagatggaacagcatgttcacaaccacaaccaggagtggtatttagtctgtgatgcagtattttagagcagtgaaggaaggatagattggccaagaaaaggtttgaggacaaggggttaatcatgtgggaaaaataaagttaggttttaagaaaatttctacctcttccacctcctagctggtggcctgtgaaagtccctttacttctcagagcctctttttccacatctgtaaaatgggcatactattcccgatccatacgatttgtgcaaatattcagtgagacactggaagcctgctctctggagtcactcagtcagcagggttgctgtttctacaacacagcaaggtccaaatcgtaggttgtttttttttttttttttttgagacaaagtcttgctctgtcagccaggctggagtgcagtggtgcgatcttgcctcactgcaacctctgcctctcaggttcaagtgattctcctgcctcagccgctggggtagctgggattacaggcgcctgccaccatgtctggctgatttttgtatttttagtagagatggggtttcaccatgttggccaggctggtcttgaactcctggcctcaagtaatccgcccacctcggcttcccaaggtgctgagattacaggcatgagccactacgtccagcctcctagtttattctttagtaactgtgtgaccttaggcaaatgccttcacctctctgtgccttacctttctcatctccagtattagcataaccacacctaccctatattattattggaaacattctttttttttttttttttacagtcttgctctgtcacccaggttggagtgcagtggcgcgatctcggctcactgcagcctccgcctcccaggttcaagcgattcttctgcctcagcctcctgaatagctgagactacaggtgtgcaccaccatgcccggctaatttttttgtatttttagtagagatggggttttgccatgttggccacgctggtctcgaactcctgacctcaggtgatccacccacctcggcctttcaaagtgttggaattacaggcatgagccactgctcccggcctgttatgggaaacattcaatgactaaagtgatgcccagtgcctggcacatgggaagcgctaagccaatggcagctgccttcatgatagaccctgaattgtagaactacagcatcttagaaagatctgcagatgcagactcatagaatcttggaatcccaggacattagaacagtagaatcttagataatacatgcttagaatcttggaatcacagagccatagaactgttgaagttttagagccagaaggaccagagaccatctgccccagtgatttgcaagcccatggaaatttgcaaatactactactaccaccaccaacaataacaacaaaagcagcatcaacagctaacagtttaatagagtaacttatctaggttccaccacaaccctaagataggtgttattattaccccattttctagattgggaaatggaggcacaaagaaagaacttgcacaagttctttcacaggtaatgagcagtagagtcaggatctgatcccgggccagagtttatgctcagattcctaagccttaccagaaatattgattcagtggttctggacaggacccatgaatctgcattttaagctacccagatgactcagatatcagctaggggtgagagccactggtataacccagaagtggcaatctggtgatcctcaggccccagtcagcctacagccatacatgtttttttgaccttcatagtgttttaaaagcagagttggcctggcgcaatggctcacgcctgtaatcccagcactttggggagctgaggcgggtggattgcttgagtccaggagttagagaacagcccgcaacatggtgaaatcctgtctctacaaaaaatacaaaaattagccaggggccgggcgcagtgtctcatgcctgtaatcccagcactttgggaggccaaggaaggcagatcacctgaggtcaggaattcgagactggcctggccaacatggtgaaaccccatctctactaaaaatacaaaaaattagccaggcatggtaacaggtgcctgtaatcccagctacttgggaggccaaggcaggagaatcacttgaacccgggagttgtaggttgcagtgagctgagaccaggccattgtactccatcctgggcaacaagagcaaaactccgtttcaaaaaaaaaaaaaagaaaagaaaaaaaaattagccaggcgtggtcgtgttcacctgtagtcccagctattcagtgggctgaggtgggaggatcgcttgagcctgggatgtcgaggctccagtgagcctagatcataccactgcactccagcctgggtgacagagtgtgactctgcctcagactaatatatattaaataataataataataaagcattttaaagtcagttgatctaaaaaatttatggcttcttttgaaaaatttggaagatgtggtagcactatgttcatgttcccaaagtgcaataattcggtggatttgagtggcagcttctccctttaaagatggcataccctctccagagagcaacaaccctcaaggcttttgttacctttttcaatactttagttatttaatttataatccctggtttggcccagctgctgcactgtaataaaagagaaactgaggtctacagaaggaaaggggctctgagtaacactgcaagtccaaggcagaaaagaagtagacctgtttcctgactcaaaaatcccataataacaacagagaacatttttggggctaactttctatgcattatacacataagctatgtgcttttcaaacatcaacgaacactaaccatcacccttaaggaggcatcataatgaatctcattttacaggtgagaaaaatgaggattggagaaatcaaagtcacttgctcaaggtcacataggacgtaagtactgtacggagaaggattcaactaaacaacagagcccagagcctgagttttcagctatgatctccctcagtctttggaacactcgagtaataaggcagggaataaatcctggttctataacctttcgactccactgtctcagagctcctgtggattagggggagggggtagaaggctcaggcacagatggtgctgaccccattttccttgcaacattcacaaactcctgatgaaccctgagtcccttgtggccacgaccaaggcggagggaagaggcaatgccctcgcctccctgtaaactgtgaataacttgtgcgctgctggtgggaagggattcgggagaaacctggcggggagcgaggagcttcagcaccaaggacagcgtccgcgctacacgccccaagccctgcggtcttttttgggagcgctccaccctgcagctctcctccaggcttctccgcccaccatttccccatgagcttaggggaactcaggcctgtgctctgccccacctcagggcaacgacaggacccaagaattccagattttacggactccctctctcctgtctttgcctctaggtagacgttaacgagccctcgcaaggggccctcccgtcagcccaggggttctcgccccattgcacggagtacgcatgcataggggagtggggacgggagagaaaacgggagccagccccgcgtttccgttcccttacgcacttccgggtccggacagcgctgcctgcagctttgaggggagcccacctgccccgtgagcgccgtcgtcatggcaaccggacaggcccgggaagcgattggccactccctgccacgcccctatgccactgcttccccgtaactgaggcaacggaggggcgctgccttcccccttccattccttcctggagagggctgtgtaggagagggacccacctcttctctcgctaatgaaacaccacctctacccccatacgttaattatggagggaaggaggatgagaggccatttgtaaactcttctggatgtggctgaactgtcactgaggtcacttccggtgatagcaggaagtgggaggcaggtcgttcagagagacaatgggatgaggtggaagagagaagaggaactagagaatcctaggaagaaaggatcgaacaatagggaatcatgccacattctcccagaccttcactccctctctgaatcaagcccactctaaatgttctggagtcctttctattctattagagctgactccctaaaaataatactaaccactaccatgtggtctttgactgatgagatttttatcagctttgtcccattgaacctcacagtaagcagtgatgtgggaggaatgtttctttgtgaatgtcaacagctttacagcaacccagtctctgccccagctgacctgcttggctctgtcggggttcatcgtggtttggggttgaaggatgttgaccacctcaggcttggtcatcgcttgtgggatttctcggaccttctcggcaataaagctgtgcacagcattcaaggcctctgccgtgccctgtactaggcatacccgctctgtggttcctgttgagcaagggagagagagggcacactcatgagacaggaatgggaacattcctgagagacaggccccatttaatggaagaggcaagctgaggtccagagagtggacctgactgatcacacggtgagcctgggggagcgggcatgggctggcaggccatgatgggcagctgggagaatgagtgccatcctgttttataatctgcacttcatctccctcccctaaaacaacctctagggatggaagaatgatgcttaaatgttttgcgatgcccacagcagccctgggcaggggagacagggctcagctgcctcttctcagttcttgcggttccctggttgctttggcaaccattcactcactccgcccccctccccttctggaagcagagagctcaggcctgcaacggttgccacagtaactggaacccccttatcggtctggctggccgggtcctcagcccacccccagggggacgagggacgaggccctgttgtcatggcaacccctgaaagcctgcagcgttggcctctgggctttttggagaggatgggggaagagctgggggatgggggaggcagaggagaggcctgagtgcctgtctgaacccaccagatggagggctgaggggtgggggagggcaggggtgtggacaggggagagcagggtgggtcaaagactgctcatggaggagtgaggaccaaggaactggggagggagggtctttcctggagattctccagatactggctgtggctctgtcctgggcatccttctcatttctgcatgagagtgttagggagtgggggcacgggggagagagaaactggggggtattgggatatgtgtgtgaaagagattctgggtgacactgtgaccagtgtgtgtgtctgcgaggctggtgagtggtgtgtgtgtgtgtgtgtgtgtgtgtgtgtgtgtgtgtacttgagcaggactagctagatgatcctaatctgtgtttgtagaagataaagtgcagagactgccttatgaacagactatgtgacacagtgattccggtgaagatgttcgtgcgtgcccttgtgtgtgggacagactttggtgtcgctttgatgatgaaggttatgtagactctttgtgagacagagctgagtgtatgtgagagtttgagagaaagaaacaaaagaatctcacaaagtgggatagaggctacacaatgaatatataccactttgagactggatggcagtgtatgtgtctgcatttgtgtgtgtacgtgtgtttgtgaaagtgaaagagagacacacttctggatgtttctgagactatttggatgaccagtgtgaatatacacatatgtacaggagacaggaaagaccctatgaccagtgtgtgtgaacctgagaaggagagacagacaggtagactcaggtgtcagtttgtaggactttttggatgactggtgtgtttgtgtatgtgtgtgtctgaacatgtgaattacagcgagacaaagaaaacttgactggtcagtgtgagaatgtgcgtgcctgggtgagccgggatgtgtgtgatgcgtggagtgtgagtgtgtctctctctctttgaaggggattctgcccctgagaatgtaaaaggtcttgagtgtggccgggtgcggtggctcacgcttgaaaccccagcactttgggaggccgaggtgggcagatcatgaggtcaagagatcgagaccatcctgggcaacatggtgaaaccctgtttctactaaaaatacaagaattagctgggcgtggtggcacgcacctgtagtcccagctacacgggaggctgagacaggagaatcgcttgaacctgggaggcggaggttgcagtgagccgagatcatgctactgcactccagcctggcggcagagcgggactccgtctcaaaaaaaaaacaaaaaaaagaaaaaaaacaaaaagtgtcttgagtgtgcaccaggcaccgtgtggctgtgtacctgtgtgtctgggatacctggggtgtgtgtcagtgtccagcaagcacttcagtgcagcacgctggtgacacgaccctgactcctcaattgccatttcccagtctggcaggccagcctcgccatgtgtctgggcgtcactgtctgtgggtcacttgtgtagctgacatcccccacccgctttgggccatgttcctcactcttactacccccccttccccaccccagaacaatggcttggtctgagccaagggtgagtcagcctgcagtctgcctccgtctggtgtaaataggaaagggtgtgggttggggtgggaactggggggcggggtagggggaggtggatgccccaggaagagctggccgagggtttgcctctctgtgaagcttccttccaactcaggaagtctttgaccttccatccccttgtagtttttacaagggggcccacaggggcttttggggaggttggttaagccccacaagagtgtctaataatagctgacccttatacaacccaagcctcaggcaccattctaagcactttttttttttttccctgagacaagagtctcattctgtcgcccaggctggagtgcagcggtgcgatctcagatcacggcaacctctgcctcccagttcaagtgattctcatgcctaagcctcctgagtagctgggattacaggcgtgtgccaccacgcccgtctaagttttgcattttttgtagagatgggatttcaccatgctggccagtctggcctcaagtgatccacccgccttggtctcccaaagtgctgggattacagatgtgagccatcgcacctgaccaaagcactttatacatacgtgttcacttaatatatgaagtaggcaatattattattgtccctgattccctgctaaggacgccgaggcacagagagggctcaagatgtgttcaagttctcttagatggtagtggatgttcagagatttgaacccaggtgtctggcttcagagtctgtgcattctgctaaatttggggtgcatggagtgatcagctctatgtgtgtatcttggagggaggcataaaatgatgacagttttatttttgtatttttgatattaaaaagaatatgaatgtattaagtagtcattcaagagtatgcacgttgatagaggtatgttataaaactataaaaatgttttttgaagtgtgtgtggtgggacacagtggctcatgcctgcaatcccatcactttaggaggccaaggtggatggagggcttgagctcaggagttcagcctgggcaatatagcgagaccccatctctacaaaaaaaaatatacaggccaggtgcagtggctcacgcctgtaatcccagcactttgggaggccgaggcgggtggatcacctgaggtctggagtccgagaccagcctgctaacatggtgaaaccctgtctctactgaaaatacaaaaaattagctgggcatggtaatggacgcctgtgatcccagctactcgggaggctgagacaggagaatcgcttgaacctgggaggcggaggttgcagtgagccgagatctcaccactgcactccagcctgggcaacaacagcgaatctctgtctaaaaaaaaaaaaaaaagtagctgggcctggtggtgcacacctgtagttccagttactcaggaggctgaggtgggagaatcacctgagcccaggaggttgaggttgcagcgagccacgatcgtgccactgcactccagcctgggtaacagaggaagaccctgcctcaatataaataaataaatacaaaataaaaagtgtgtgtgtgtctgtgcttttcttcagcagttagggtataaagcttcaagcagatgttcaacatcagacggtgttttagaatccctagggtggccggtcgcggtggctcaagcctagcactttgggaggccgaggcgggtggatcgcgaggtcaggagatcaagaccatcctggccaatatggtgaaaccctgtctctactaaaatacaaaaacataaaaataaaaaaattagttgggcatagtggcacatgcctgtagtcccagctactcgggaggctgaggcaggggactcgcttggacccaggaggcaggggttgcagtgagccgagatcacgccactgcactccagcctggtgacagagcaagactccgtctcaaaaaaaaaaaaaaaaaaaaatagaatcctcagggtggatctgggctgacgcaagggagtctgtgtggcccttgcgcaggtgcttgcctttttctgcatttcagttgctccatgtatgacctggatggattgaatctagggctttgggatccaccacaaaggaggggaggttgtgtgttctgcccttctcttggagttaagtgccaggtaggtttttatttcatgtagtagacacccaagtgctgtgtgtgtgtgtgtgtgtgagagtgtgtgtgtgtgggagcatgtgtgtgagtggggtgtgtgtgagtgtgaatgagtgtgagagcacgtgtgacaatgtgtgtgtaagcgtgtgtgtgagtgggatgtgtgtgaatgagtgtgagtgtgtgtaagcatgtgtgacaatgtgtgacagtgtgtgtgactgtgtgtaagcgtgtgtgtgggtgtgagggtgtgagtgtgaatgagtgtgtgtgagcatgacagtgtgcgtgtcagcgtgtgtgagtgtgagcgtgtgagactgtgtgtgagtgtgcatgtgagagtgtgagtgtgtgtgcatgctaacctactaggcccagagtgccctttcagtttctccactgtcatttctcacatgttctgtctgctttggctacattgaccaaactgctcagcagcctccgagtatgccattttgtcttcctgggcacacttccctgcactttacctcgctcatccttccctactgctctggtcgtctcttccaggaagctcttcctgacctccctgggctgggtcctttgtgccacttgggctccaactaccaacctctggacttcctgtcccagccctgaccactctgggtcatcactggtgtgacgtctgcttccctgactgggatgtgagaaccaaggaagcaaggctgggacatttcagccactgctattgtccccatttctgtctggcaccgggctggcatagaggaagtgctcagagaatgtgtgttgaatgaatgagtgaatgaatgaatgacagggtgtcacgccaggagtggagggaagtgttttttgtctcctgcagtagcttttccattttcctacattcctgtgggatgtaggactaggatgtagggggctgtgtcctgcttctctgagtcagcagccggctcatgctgtatgatctggaagttgcacgccaggagtggggatgggggctgaccacatgtccaggggctgaggagagacgctggctcctgttgcttgtctgaatactgtttgacctggtaggaccaatgtctgtcccgccttctgggtttcccagctgcctggcctgtggggtgtgtcaatgggctgggaggggacgacatgtctcgtggcacagaatgtgatccaggagcaaggaaccaagtgtcctcggaggaacattccgaacagaggtcttatccatatcttgtgggctacaggggagtggggaaaactgggccagggtggaagagaaaaggaggaggtgtgcctggttcactcgatttttctctaaacctcttgccaaagctgcttagtgagatgggaggctgggggcggggtggatggtggagagagagagagagagaagaggagagaagatagagcagagagagaatgagagagaaagagggaggagagagggaaagataggagagaggagagacggggtggggagagagagagagacagagagggagagagagagagagagagagaaagagagagagagaaaatgagtgcgtactgaccctgggctccagctctggtgtttgacctaaaaaatccaaggggattaaggatgaactagaaccagcactggaccaaagatgcaattcaggaggccttccctggagtcctagatgtcgatgcttgtcgggcattggtcttgggagggagatagggagaggtgagagactttggagggaatagagagagtggaggggccttggaaaatgtatggttgggggagaaggatggagcagggggagaggcagaaaagggactgggtttggaggaagggaagaaaaaaccaggagggagctgagacttaggaaaaaagagacacaggaagggagaggcagaaagaaatgtgtgacgcccgcagaggaggacctcagtgagagggggctagtagatactggttgaatggatgattgaacagagttcagagagagagaggaggaaaggaaaaacgtgagactatgagaggtggagggaaggaaaggatggggagagagacaggaagacaaaaggagaaggaaagatgaggggagggacagggaaagcagaggacagatgaagaggacaagagatggggggtatccaaacagaaccagagagatggacagagaggcagacagaggggcaagagacagagggaggcagaggggagcaagagacgagaagtcagaaacagaatgagagggagacacataaagaatgacaccgagacagagaaaaccagtgagactgggcaagagggggtgacagaattccaaaggggggagcaagtgtgtggaacatggctggctggcccccaagcccggagggacgccctgacacctgcctccctccccaccctcgctcctccaactgaccagagggggcaggtgtgtgggaaaagacacatctgccagcgcatcatgcaaatgagctcatgaatatgcagcaggcccgttgtcttgccctgcccccacccccatctgctcggccaggcccctcgggctgggggcagctctgtccccttaggggaaggggaggccccctccccaccactgtcactgtccttagggcagaccttccccctcatctagggcccaggtgggagggagaaagggaggaagggcggggggcctagggcagagacctgggccggggctcaccggggtagaagtctttggacttggagagcttgatggtggctccggtctccttctgcagctgcacgatggtctgcccgcccttgccaatgatggagcccgccgcgtagctggggatcagcaccttcaggaagtattcgccttcctctgcgggggcacacagggtggaggggagtcagcgggggaggggtcttcacctttggagggggtgagcagaggaaaccccaggggtcacagtagcagtatggagaataatacaaataatgatcttcattcactcattcattcaacaaatagttattgagcacctgctacgtgcctggcactggtctagggaaacagccaagaagaaaatagacaaagctccccgatttgtgggcaaatgaggcaaataaggccgaaagagttttagtgattcagccaagagctcgcacagctagctacattcttctaggtggggaagacagacagtatatttcatgtcagatggtgggactcctgatgacacaaaaaaggcaggaaaagggggtcagggagggtgggaggctgcagtgtcagagagggaggccagggaagctcttcctaagaatgtggcaggctttattcatcatcacacacttttgcagcacctgataggtgctatactgttctaagtactttccaaataccagtcctttgaattttcacacttatcctatgaaggaacccatcatacagatgaggaaacaaaggtgaagaaatcacccaaggacacttgtaggtggcagagctgagatttggagtccatgctctgaactattatgatcatcaggatatggaggaaggaacggaaccacatggctatgtgaaggacgagtgagtgcaaaggccctgaagtgggactgtgcctgtgctcttccagagggactaaggaggcccctgtgcctggggctgaatgagagaggggaagaatgggaggagatgaggacagagaggggtgctggtggtgaggggtgatggggctcgcaggccacagtgaggtccttaacttttaccccaagtgagatggagccatgggagggatgtggcctgacttaggttttaggaggattcctctgatgcccatgaggggagcagaccgtgagaagcaacggtgggagaggtgggggcccagtgaggtggcgactgcaatggtccaggcaggaggtgacggcggtctgacaggtggaagcggtgagcggggaggcagaggaaggccggacgctggggatgctccgaacactcacttttgatcaggcgctgtgctgagtgctttgtgagcttgatctcgtccgttcctcacaacctcccggtgaggcgggtggaatgagctccatttttacacaagaggaaactgaggcacagaggggcacagagaagtgaaggtaccagcccacggtcatcaccagcccaaggacacgaacacagctactgggctcagattcaaatccaattctgattcagtctcctcccatcattgcttaacaccctccactcctggggggaccaacacgatgaaggacagcctcgaagacctagatgcagtgccagcggcagcttgtggagttttggccattctttgttataggccaatttttcttttccttttctttctttctttttctttttttgtttttcctgagatacggccttgctctattgcccaggctggagtgcagtggtgcagtctcggttcactgcaacctccacctcccgggtgtaaggggttcccctgcctcagacttccgagtagctgggactacaggcgcccgccaccacacgtggctaattttttgtatttttcgtagagacggggtttcgccatgttggtcaggctggtctcaaactcctgatttcaagtgatccgcccacctcggcctcccaaagtgctgggattacaggcgtgagccaccgcaccttgcttattataaaccagtttttttgaccatgtgaaaagcattttgttaatgtagtctcaaggcaagcatctagcctcccctgcccgttgcccctacgtgcctccaggatggaaattctggacacttctcagtataagaagaccctttgcggccgggagcggtagctcacgcctgtaatcccagcactgtggaaggcggaggcggaggcgggcagatcacgaggtcaagagacggataccatcctggccaacatagtgaaactccgtctctactaaaagtacaaaaattcgccgggtgtggtggcgcgtgcctgtagtcccagctactcgggaggctgaggcaggagaatcgcttgaacccaggaggcagaacttgcagtgagccgagatcgcgccactgcactccactccagcctggcgaccctttgtgacttggccccacccacctttccagcttcacttcctcatcttcctccgtgagcctcaggctcagtgcatattttgttccttaaacgtgccctgctccttcccaccttagggcttttgtgcatgctctgtgcctggcagcttctcttcccctcagtcagtttctttttttttttcttttgagacagagtctcgctctgtcgcccaggctggagtgcagtggcgcgatctcggctcactgcacgctccgcctctccgattcacgccattctcctgcctcagcctcccgagtagctgggactacaggtgcccaccaccacgcccagctaatttttgtatttttagtagagacggggtttcaccattttggccaggatggtctgggtcacctggcctcgtgatctgccctcctcggcctcccaaagtgctgggattacaagcgtgagccaccgcgcccgggccccctcagtcaatatcttttgtcctttaggttctcactcaaatgtttcttcttcttggaagctttccttgaaccccaaagataggatgaatccccgtttcatgccttcagagtaactgatcacagaggtccactgtggatcacatccatagagctcacccatgtcctagggacttgaacagtgtccccaaaacttgaacagcacatactaggtttgcaataagcactgggaaaagaaagggaggagttaggccatcctgcttccaaattttaaggtcttaaaccatcccccaatggtttttcaacttttaagcaaaggaagcctattttctttttttctttttctttttctttttttttttttttttttgagacaatctcgctcttgtcacccaggctgcagtgcaatggcgcgatctcggctcactgcaacctccgcctcccgggttcaagcgattcttctgcctcagcctgcggagtagctgggattacaggtgcccacaaccatgcccggctaatttgtgtgtgtgtgtgtgtgtgtgtgtgtgtgtgtgtgtgtgtgtgtgtgtgtatttttagtagagatggggtttcaccatgttagccaggctaacatgtgctgagattacaggggtgagccacagagcccagccaggaagcctattttcaatgtctcacgtaaaacctcaacatacagaacagataaaagagaaactgctctaacactctctgatctctctctctctctctctctctttctctttctctgttgcccaggctggaatacagtggtgccatcacagctcactgctgcctcgacctcctgggctcaagtgatcctcctgcctcggcctcccaagtagctgggactacaggcacatgccaccactcctaggtaattttaaaattttttgtagagatggagttttgccatgttgctcaggctggtctcgaactcctgagctcaagggatccaactgcctgggcctccaaaagtgttgggattacaggcgtgagtcaccatgcctggcctctgcctggcctcttaagatgaaagttctgtgttcccttatgtgtgtaagatgggggtgtggtaagaggggctagatgtggctttgcaggcatggggaagggtccagaattaaggagtttcctgacaccaaggcaatcctcttaaacttgcttaatcagaccattaagcctattaggtaattaacccctctctggtgccttcctaccaatcatcctgacccctactgaattcattctcttccatggactcacggatatgtcctcttccccaccctcaccctaaacttgtcacagataaggggtcctttatctccagaaggctcagaaagatggggagggaattctcactaatccctaggactccgtcctctctctgcttcttcaatttcactccccatcttctctcccagccagagcatcttccctgcttccctctgagggtggaaggtattcattttctctgaagaaaactggggtcaccctcttccccatcttctgccccctctctcttgtacttctttaaactgtccctgagaatttttgtatgaaacagcagaagcaactctagactaagagtgacgtttatggtcgagcgcagtggctcacgcctgtaatcctagtgttttgggaggccaaggcgggtggatcacttaaggtcatgagttcgagaccagcctggccaacatggtgaaactcccgtctccactaaaactacaaaaattagtcaggcctagtggcacattcctgtactcccagctactcgggaggctggggcaggagagtcgtttgaacccaggaggcagaggttgcagtgagctgagatcgcgtcactgcactccagcctgggtgacagagtgagactgtgtctcaaaaaaaaaaaaaagtgcattttgccactgatgggctctatgcccttgggcaagtctcctcacctctttgggcctcagctttcctcatctatacaatgggaatcatgatagtgctacttcatggggttactgtgattaatgaaatgaggaaatgtaaggaaaggtacttcggatggtcccaggcacatagaagatttgagaaatgttagatatcatcattatcagcattgcctacaccatgaacacaagttcagtgcttatcacagcatcagacacagagcaagcaccctatacgtggggtttgggggttgggttgagaggtaggaggaggggtgatcctactttgttaatcacccatttccctagggggctgtcccaaacttttccctccttcttggaggaggaatgtcctctcactgatacaagccagaccttgtctccattctctgcactcagcctctctctaattcctgtctttctcatgccaccttctagaattttgccccttttatgtccttctgtactggaattgttctttcttctctttttctctccttcttccttcccttcctccaacaaatccttcctgagcacccatgaccttccagtccttggttcaggtgctggggatgcagcagggaacagacaaggtccctttcctttaaattccttttaaattttaaatgcatttatttacttatttatttattgtatttttagtagagacggggtttcaccatgttgcccaggctggtcttgaactcctgggctcaagggatctgctcaccttagccttccaaagttctgggattacaggcatgagccaccgcgcctggcctaaatgcatccatttaaagaagaaattaggccgggtgtggtggctcacacctgtaattctagcactttgggaggccgaagcagatggatcacctgaggtcagaagttcgagaccagcctgaccaacatggtaaaaccccgtctctactaaatacaaaaaattagccagacgtggaggcacatgcctgtaatcccagctacttgggaggctgaagcagaagaattgcttgaacccgggaggcggaggttgcagtgagctgagatggtgccactgcactccagcctgggcaacaagagcgaaactccgtctcaaataaaaaaaaattaagaagaaatttaaaaatcgttgctaacaattggagcttgaagggctggttgtttttgttctccctaacatacattaatataaacatacaatgttcaaaaatgaaaaaaaagtttgtccatggaccaccttaaatcatcttgtgggtggcttgatggtccctgtatcagactagtgcaaatctgacgcctggagccccctcttctagtgagtctcctatgaacagtgattggctaagacctcccacctgtagagactcagcacttgaattcccaggagtccccgttgtgagcatcagtctgtgctggtccttcccagaattttatgcacatcttttctgtttggggaagtttcccaccatgtgagtcctacctccccagaaagaaaccaggtctctattgaccagccttcctcacagcaagggcagacacgtgacctcagctgaactcggagccctcagccattacgcacgcccaccctgtttgaacaaccaaggcactgcttgtgagaaagttctcccttgtagtgaggcagaatctacatgccagaactccgcacccacccattcccatcccactcttcactcttcccttgagtccaggcagctccctctacccgatgtaagagtctgaagaactgaagatagcaagttcaggtctcctgactaatttcctgctgcaatttcaaacatttccaccttggaaaggtgccgtctttccccttctagtcactgagtctctgctcttgctccttttgtatccaccccctcagggatgcttctgacggctttcaaaaatcccagcactttgggaggccgaggtgggcaggtcacctgaggttaggagtttgagaccagcctggccgacaaggtgaaaccctgtctctactaaaaatacaaaagttagccgggcatggttgtggcacgcctttaatctcagctacttgggaggctgaggcaggagaatcacttgaacctgggaggcggaggttgcaatgagccgagattgcgccactgcactccagccggggtcacacagcagggctccatctcaaaaaagaaaaaaaaaaaatcagccaatactcccttcccccttccataaataacaattgcctacccaagagatttggggtgttgtagtaagagtggcctattttagtgtcagagagttcaccctctaaggtggctttgatcttgggggtcatgaatgacaaaggtaaagctgaaggggtgtgggttgttgaggtgttgtttttggtgttagtgtgtccagatgcaacatcaatgttgggtgttgtcctcatggcacctcatggttttgtttgggggctggggaagggagagctggcatgttctatgagggtacgaggaggctggggtttgacatcggtgttgtcatcgggagcctgtggggatgctgctggcagagagggtgtggggtgggagcagtactgccgaggaggggtgggacttcaggcatgtgatgtgtttctgtgaatggcggtgttgcctatttggtgtgaaatgcaatacaactagagtgtgcttatgtagggatgagatgctgaaaggtgtgatgctgccttgagttgtgacggtctctaagtgaaagaaaggcagatgggccacggttttcttggagtgaatcaccattggatggtggatggtgaaaagggaaaatgacatacacttatataataataatgatgatgatgatgatgatagcgactgtttactgagcacttaccatctaccagccttacgctatgtgcttcacatatgcaatctcatctaatgcacaaaacccagagaggtagatcttcctgcctccatgtttcagacaagcaggctgaggctcagagtagtgaaataactcgcctgaggattccacaccaagcacatgacggtggcaagatatgaatcctgaaagagctcattctaggaggggctcttaacctggtgatgttgacttcgtgataaagaatgtggccgggcgtgctggctcacgcctgtaatcccagcactttaggaggcctaggtgggtagatcacctgaggtcaggggttcgagatcagcctggtcaacatgatgaaaccccatctctactaaaaatacagaagttagccaggcgtggtggcacatgcctgtaatcccagctacttgggaggctgaggtacgagaattgcttgaactcaggaggtggaggttgcagtgagctgagatggcaccactgcactccagcccgggcgatacagcgagactctgtctcagaaaaacagaacaaaacaaaacaaaataaacaacaacaacaaaaaacaaagaatgagggatgtggctgggaatggtggctcacacctgtaatcccagcaccttgagaggatgaagtgggtggatcacctgagatcaagaatttgagaccagcctgggcaacatagcaagaccctgtctctacaaaaaaattcaaagaattagtcaggcttggtggtgcacacctgtagttccagctactggggaaactgagatgggagcatcacctgatcctgagaggtcaaggttgcagtgagccatgactgcaccactacactccaagcctgggtgacagagtgagaccctgtctcagaaaaaaaaaaaaaaaaaaaaaaaaaaaagagggatgttaggagcaagatctggctggtgtaagctacgttgagggtgtgagatatgtatgtatgtctgtatatgggtttttattttgggggggttgacagaggtgggaatatagtcaggagtacaggggtcattattgttgcagcttaagagttacgatctgtatcaagggggccactgtttgttattgtcctgccagactggggtcatttatttctgcaaggagtccctgactagagtttccgtccaacctcttcacccaagtcttcctgcccttagtgccttgttttcctcccagcggcatctgccagccactcacagtgcccagaagcaagtgtgaactgccaccatctcctccacttctcccatctgctcccagaagcgggcaggagtggggcaagaatctcatctgtccagtaggccactgcttgctgggacacccaggaaaagccctctgagcctcagtttccccatctaaaaatagggtccattctagtgtctccccacacaatggagccagccgcctaagttcacatcatggttctgctgcttatcagctgagtgacgttgggcaagtgacttaacctctctgtgcctcagtttttcatctgtaacatgggttaacatgatagaattgttgtaaggattaaggaattgatccatgtcaagcacttcccatgatagttcctggcatactgcagtatcgtaagtctagccattattataactgattattattattccatcatagcatgttgggagagtgatatgaaattgcacgtaagacattaaacaataatataggtagctattgttagtattatccttgtgttttttgttggtttttttttttttgagatggcgtttcgctctgttgcccaggctggagtgtggtggtgcgatctcggctcactaaaacctccacctcctggattcaagcgattctcctgcctcaacctcctgagtagctcggactataggcgcccaccaccatgccccgataatttgtgtatttttagtagagatggggtctcaccatgttggccaagctgttcttgaactcctgacctcaaatgatccacccgcctcagcctatcaaagtgctgggattacaggcatgagctactgtgcccagccccttatggtcatttttatgtgcccacttggcagatgaggacactgaggctcagaaaaggggatgggttggcccagcatcccccagctatgaatgtatattattgaaagaagccctcaattttgggatcaaagtcctggacccttgcccagccctgcccctgagtgtgtttctgtcaatggaggcctgtccctctgcatctcccggcctcagtttccccatgagtaaacagaagcggggtgggagacagtctggaggagatggtccctaaaggctcatcctagtttccccgctgtggagggaggcaggatagcacagaggttacgtccaggagctccggaaccaggcagcctagggttgggtaaattctagctccatcacttagaaaccgtgtgaccttgggcaagcggtttcattttgctgagcctcagttttcctcatctgtaaagatgctcaaatcatgtctcccaggggttgtactgagatattaacccatgtctcagagtagtaggtgccaagtaggcagatgtgactgttattagcagcagtggcatcagtgttaagttgtgctgagaagtgatcagattctaagcatctcagtccctgtagagaaaggtgggaaccccctaccctctggaggacggtggtggagggctagacagtctggctgggctcagggacctcctgggtccctgacctctccaggactgggaacagcagtggggcaggaaggagggaaggaagtcggggacatattcatgtgtgtgctgggggtgggggagcaggaagaaggacaggaaactccctcccatcccctcccccaacttccctttcctccaatttctgctggacaccctcacaggcatccagggggtccctgattcctgtcccacctggatggaggtgggggagggctaggatgggaggaagaaagtcggcttgtattcatctgtagggaggaggtaggaggcccccaccccacccactgccaggcctggcggagaggaaagggtgcactctgcctgaagccatccctctcccatccggaggaaaaggccagaggaagtggagattttggcaaggtgaccgcggggaggggcttgtccgctgcggggtctccctcctaccagggagctagaggacagggctctgaggaccccaaaaaaccccacctcttccctgagccccccacggcagggcatgcacctagagttcccagctcggcttttcttctctggtacacacacctccttgggtcacacacccagggagagcccctctcttccctcacactgccttccgtggtgtcaaacattcggcaatctccaatacacacggacacacacacagcctcccttgtcaaacacatgcagaatcatccccatatctctggtgtcacacactcagccatttcacacacacacctctccttgttacacccatacacacagctgggtgtcatatgcacacgtgccctgtcacatggggacccatccttccttctcctttttacacaccctcgtgcgtttcacccacaagccccagcctctccctcgtcatacacccaccttccctgttgcacacaccccctctgatgtcactgttgcacacctccatgtgtcacacccagccacagcctctctggagtcacacccacacccttttcttgtcacatcccctcaccagccacgcctgtgtcacacacactggacccctttcctctgatctacacggcctcttctggctgacacccagagccagcccattcggtgtcccccacacacctccttgcatgtcacacacaccctctcatgtgtcacactctgccacagcccccttgggggtgacaagcacacacctttccttgtcacacgtacccgctggagggtctcaaacatggagcccagcccctgtcccctgtctttctcatacacccccctatgctgtcatattcctgatccctaatgtcacacatccaggctgtagagggcacacatacacacacacgcacacacatacacacctgtcctagcctcacattctcccacctagctttacacacccaccatttcctccatttcaccccacacacctacccagcctgtccccacgcacgatccggccagggccacacaagcctccatctgggacaacccttgttcaggacatccccagggagggaggctgggaagctcccggtccacaggcctctactccttcccctcccccagccaggacacgcgagctcggggaacacccctgctccgaaagggtcacatcacacacccctcaaggacacacagacacctgccctgaggctcccacgccccccatcttctgcgccccccaaggacacttatcaccccctcccccccacccctctcctcgcagacaaagctcccagccccgggcctcagcgagaggaggagggggtccagccccctcctcaactccccgctctgtcccccgcctcggggaggggtgtctctcccctccccagagcccttgcacctgccacgggagggggggaaaggatggagaaaggcgaggccccctgcccgctcccccgccccgagccgcagccctttctcacctcccgtgttgctgcgcttggtgcagaccacctcggggggcgtttcgaggggcctcttgcgggaatccggggcctcgggctccatggggggggcctggggcggcggctgctgctgctgcggcggctgcggcggcggcggcggcggctgctgtggcggcggcgacggctgctggggaggctggggttgcggcggcggcggcggcgggggcggcggcggctgcggggccgcggaggccgtgaagaggccgtgcaccgcgccggcggccatcatcctcatggtgggggggggcggggggcggggggcgggggagggggaggggaggggaggtgggagggggagggggcggtggagggatgggggagggggagccccggagagggaaggcgggggtaggggggagccggttctcggggggctgacagagcctggagagcggccgtgagcaggatggcagggccgaggggggtctccgatagggccgggaaagaactgagaggtggggtctctcctgggaccacagaggctggggactggacgcgccactggggggacgggactccccgcttcttcttggctccctggggcaagagggccgagccccccagaccctgctcggggtggggggccggaggagcgtggccggagtgggaggcggaggcggccgctagtgggggcccggggggcggcgggcgcgggcggcggcggcgacggggctggcggtggctgctggcccgagcatcttcttcccggaggctcccacagcgcctggcccctcccacccaacgaggtcacgcccatgccgggtagggccacgcccttcggcgcccccattggtccagccttgaagcctggaccacgtccctctgggttggccacgcccctcccggcggcagagagctggacccgactcccccaggctgctgggaggaccccgggctcctccaagccgtccccactcctcaccttgaatgaacgtttattgagcacttactgtgtgccaggtccggttccaagcaagcacgtcacagacgttatcgcatttactccccagagcgaccagctctgtgagttacgcttattatccctattttacagatgaggaaacagccttaggagcttactttgacttcacttggtcaagacaagaaatttcgactaggcgcggtggttcatgcctgtcatcccagcactttgggaggccgaggcggaagaatcacttgagcccaggagtttgagacgagctgggcaacaatattgtgagaccccatctctacaaaaaaaaaattttttttttaattagccaggcgtggtagcacatgcttgtagccccaggtactctggagtctgaggtgggaggatctcttgagcacaggagtttgaggctgcagtcagccatgatcaagcaactagattcgagcctgggagacagagcaaaaccttgtctcaaaaaaaaaaaaaaaaaagaaagaaagaaagagaaagaaatttcacttcactctttttcaatcctttcagctgggaaattccccttcaaatctttcatccatcctttgaagaatcaacaccgtgatgctgaaagggctcagaggattgaattcactgagctggagttgcagcctgcagcacctgccctggggcacaactggctctccattcaaacaacagcactcagggcctacctactaagtgccaggcactgtccctgatgctgcgatacaatagagaacaaaacagccttggcccttgtacagtattactactcatgtcattaagaaaaatttgttttcagatgacaaagtggaggcctgggaacattgagggtggcttcttcaagggcacacagcttgagagagagaaactgggatgagaacgcaggacaagtccaatttcagagcccaaagtcattggaactagggtgcctttctttggaatggatcattgctattattctgtgttccttgatgcaagaatttccttctccctgggttcttaacctccaaggaatctttccttcctgggttggtcagaggcaagattaggctcagaaggggtctggatgcaggtaattgtggccactgcgtgatctgcggcagggggatcggctccaacccccccctgctcctcccttgccatgctctcaggtccccaggatgggggagggtagcagatggcctggggtggatggggtggctacccatctgtcccctcccccccattgtccccagagccaagggggatgggagggggctgtggtccactgcagtctggatcctccccctccatcttcctggagggagctgaggagctggttgccatggagatggggaagaggcaagacggatatagggagatacgggggtcaggctgagtaccacaccttagaccctttgagtcaaatagcctcacaccacacaggtacatatcccaacatccatgaaattagctgtgaagtttccccctctgtgtgacacacacagagtcacactggccctgctgcaggtgcacggtctcaacacagtcacacagacacacttataggggataggcacacgtacacacacatacacactcatctgtaatgcacattcagtcatgcagacgcaaggccacaacacaggctctcatacacaaatagacagacacacatctaatatgcaggtatgtcccaggtacacacattcagagccacgacagctccacacttggccccacacactcggaaaagttacaaatccatgatcaaagccacaggacatccatggcctatgttacataagacatatcagcgacatgtgatgtatagactgacgaacagactaagtctttccttgcacacaaattgggtaaacacacacaacacacacatttagatacacggcccacataggctaacgcacacaataactggacttcacgggccactcagtgacacgcacaacacacatggaaagctgtgtgccgctcagcccccacccccgaggcatgcctgcagccccaaccctgcgctccccccatcgagccctcccgtttggacacacacaacagcacggtcggtcacgcactcacactcacacacaaacacaaacctcctgctagatatttttaaacccgggctagttctgctgccatggcaaccgccccaaacccatcaccatagcaacccaacgtcagctttccaagcaccaaatcctgggggactgcagggccccaatcagaggctggcggagggggctgctgcaccctttgccatcatccatgccacccttgtgcccccaccccagagctttcaggggagcagtcaccctagtctgggcaggggccagagtcagggacatcagagacccccaccaagctggggcaggggatccccgaacctgccttttccttccaacctggcagagctatatggaggggctcgttggagtgaaggtcagcttacagaagcctgggtttgagttctggccctgccatttacatgctgtgtgacttgggcatgcccttaccctttctgagtctctcattctttaatttggaaaatgttgctgctgctgttaataccccctttatttttattttattttttattttttaattttttggtatttttagtagagacaaggtttcaccacgttgaccaggtgggtcttgaactcttgacctcaggtgatctgcccgcctcgacctcccaaagtgttaggattacaggcgtgagccaccgtgtctggccaatatcccctttaaatgactgttatgatttggtggttaaaagcccagacagatctacatccagattctggctttcccacttcttagccatgtgaactcaggcaagggccttctcctctctatgacaagtctcaggggtaaatagtccaattacatagggctgctgggaagattccctagcaaaggggtatggcaactgtcctaagaactttgcatgtattctaacttatcagtcttaaacatggtcttatgggtggattactattcttatacccatcttgcggaaaaggaaactgagatccagagagcttgcctggtgtcacatagctacaaagtttagaaggatgggatttgggccgggtgcagtgcctcacgtctgtaatcccagcactttgggagggcgagatgggaagatcacttgagtccaggagttcaggaccagcctggacaacatggtgaaaccccatctctactaaaaaatacaaaaattagccacgggtggttgtgcacacctgtatttccagctacttgggaggttgatgcacaggaatcgcatgaacccaggaggcagaggttgcagtgagctgagatcgtgccactgcactccagcctaggtgacagagagagactctgtctcaaaaaaaaaaaaaaaaaaaagaagaagaaggagaagaatgaatgggatgggatttgagcctgggcagtcaaagacacatctttagccatttctctctcctgcctctcaaagagggcagtttggagaagggtgacagaatggtgcatccttggaaaggctttctagctttgttttctgggatgaaatgaaaggcctcagtctttcagcctacagaatggaggttgaaatgatactgctggctggagtgtcaggaggatcgataaggcagtttgtacctgttgggctctgaggacaggctggcacccctgagtgctcttgcaggtgtggagcagatcaggagaggctgggcgagtgggcaaatgggcaaggattacctgtgcaggctcaggagagaaactcactggggctcaagcctcagctttcccagcctggtgatcttaggcatgagatgtctccagcctaagcctcagtcttaccatctgtcaaatgggaatcatgaccatactcggggtgtgacaaggagtccatgagccaaagcaggcaaaaccacttggcacggatctcaacaaagagataaatctgagctgctattaatatcatccatctactcagcgcacaggatttaggagaggcaggactgcaaactttttttgcagggtttttgcaaactttgttgactcacagtgagaaacacacatcatgatgcaatgcatatattaggttggtgcaaaattcattgcgatttttatcatcaaaagcaatggcaaaaaccgcagttacatttgcaccaacctaatacaactgaaatgaaagtttcatgaaaccacgcttcatctccaccttagtctacattatgttgacactatgtgcgtagactctgatctattcttttttttctttttttttttgagacggagtcttgctcagttacccaggctggagtgcaatggtgcgatctcggctcactgcaacctccacctcctgggttcaagtgatcctcccacatcagcctcccgagtagctgggattacaaggagccgccatcatgcccggctaatttttgtagagatggggtttcaccatgttggtcaggccggtctggaactcctgacctgaggtgagccatctgccttagcttcccaaagtgctgggattacaggtgtgagccactatgcccggctgactctgatttattctatgctattgaaaaaactactggttgattttacagcctgctaagcagttgtgaccgacagtacagaacaccctggtgtggcgattacaatgtggaatccttgagtccctggaggattttaagcaaggaagtgacatgggcatcatagggacgatgaaggggagggggctagatgggggctgggatgaagccagaatggactctaagaaggagggatcctttgcctttaccccctggcagaagcagcggagatggagatcgtttgagcttgggaattcaaggctgcagtgagctgtgagatggagaggtgtggtcatataccaacaccagaaagcagctatctcagcgctttgcataaaaaggtatagtggggaggagcatgaaccccagacactcatctgcttggcaaatatttactgagcacctactatgtgttgggcactgttctaggtgctgggaatacagcagtgaacaaaacagatacaaattcctgacctcatgagctcacgttccagggagacagataatcaagtaaaaaagtaatacatagagtgtgacagatgaggctaactaccgtggggaaaatgcagcaggggaggaggaagaggcatagggtatgggggcaggggggatggctgcaattttatttatttatttatttatttatttatttatttatttactgatggagtctcactctgtcgcccaggctggagtgcggtggtgggatctcagctctctgcaacctctgcctcccaggttcaagcgattctcctgcctcagcctcccaagtagctgggattacaggcccgcgccatcatgcccggttaatttttgtattttcagtagagatagggtttcaccatgttggccaggctggtcatgaactcctgaccttaagtgatccacccacctcggcctcccaaagtgctgaaattataggcatgagccaccacacctggcctgcaattttaaatagggttgacatagagagagaaggcctcgctgaggaatgacatttgagcagagacctgaaggaggtgagggagtgggccgcatgggtctgtagggggagcagcaggtgcaaaggccctgaagcaagagcatgtctagtatgttggaggaagagcaaggagcctagggaagctggacgacagtaggggaggggaatagtgggaggaataaggctaaagagccagtcagggagccaactgtgcagggggccttgaggaccaccataaagacttcaatttgtatgcctgtaatcccaacactttgggaggccaaggcaggaggatcgtttgaggccaggagttcgagattagcctggacaacatagtgagactctgtctctacaagaaattaaaataaattaccagatgtggtggcatatacccgtagttccagctactctggaagctgaggatcgcttgagcccaggaggtcaaggctgcagtgagccaagatcacgccattgcgacagccttggtgacacagcgagaccctgactctaaatcaattttttgttaaaagacttagatttgactctgatttaagtgggagccatgggggtgggggggtggttgtgaacagaggaagaacttgagcagacttaaattttatcacatgatccttctgggttggatacagtggctcatgcctgtaatcccaacactttgggaggccagggtgggcgggttgcctgaagccaggaggttgaggctgcagtgagctgagatcgcaccactgcactccagtctgggtgacagagtgagaccctgtctcaaaaaaaaaaaaaaagttggggaggccaggcacgctgggtcatgcctgtaatcccagcagtttgggaggccgaagcaggcagatcatctgaggtcaggagtttgagaccagactggccaacatggcaaaacctcatctctactaaaaatgtaaatattagcaaggtgtggtggtgggcgcctgtaatcccagctactcgggaagctgaggcaggagaatcacttgaacccggaaggtggaggttgcagtgagccaagattgcgccactgcactccagtctgggcgacagagtaagactctgtctcaaaaaaaaaaaaaaaaaaaaaaaaaaaatactggggggaatccttctggctgtgtatgaagaacatggtagcagggatggggcagaagtaaggagcccaataggaggtgactttgaccaaccaggtgagaggtgctggtggttggaccaggatgtgagacagcagtgctggtgaggagatgtcttggaatcccagttctcccctgtgactttgggcaagtcatttcagagtctgtttcccgatttacagatgaggatgataataaagctcccacctcagagggctcctgcgtagtcttcatttcactgagcgtgaatagcccctggcacaagtgccgcctgccattgtcactaattttatcctcaaggctcctggatcagggcacttctgtaccctgcccagtggtgcacaggtgggctttggggaggaggataaggagaagagatttaatcttgtgtgctgattgtgtgtttatctgatcctggggatatctgagtcagggctttctcttcctaacagcctgtctgtagtagggagtattgaagtccagtgaggggtgctagcttgcccagaagcccacagtgagttgggggctgagccagggctagaaatctatccctgcctcctgttttctcaggcctgtgttccaggtcctggctgccaccttggtgattttggcaactgactgagtcccctcccccgctccagcctcaacatcttcctatgagtccctgctgcctctgggagaaattccaaactctcccggttgctcaggccaaaaccttgcagttgcccttgacatccctttcttcctcacacccacatccactccatcagcaaaccctttctgctctaccttgagttccaaatctcaccccatctccctacctccagcggcaccaccgaatgggggtccattagctcccacctggactctcccaggagcctcctccctcagaccccacttccacactggcccaccctttcccaccagcaaccagagtcatcctttttttttgagaccgagtctcgctctctcgccaaggccagagtgctgtggctcaatctcagctcactgcagcctccacctcctggattcaagctattctcctgcctcagcctcccgagaagctgggattacgggcacgtgccaccacacctggctaatttttgtatgtttagtagagacggggtttcaccatgttggccaggctggtctcaaactcctgacctcaaatgatctacccgccttggcctcccaaagtgctgggattacaggcgtgagccaccgtgcccggcccagagtcatccttttcaaaggtgagtcagatcacgcactgcgctttatctaaaagaaataaaaatggggtttctggccaggcacagtggctcatgcctgtaatcccagcactttgggaggccaaggcaggaggatcgtgtgaggtcaggagttcaagaccagcctgggcaacacagtgaaagcccatctctaaaaaaaaaaattcagccacacacagtatcttccacctgtagtcccagctacttggcaggctgagatgggaggatcatttgaacccaggaattcaaggctgcagtgagccttgatgacaccactcgcactgcagcctgggtgacagaacaagagcctgtctcaaaaaaaagtgtgcgtgtgggtgatttctgtaagaaccttgaggaacaatctgtattgctctatttcttggcttaggttgtggaagacgaaggcactttctgtgtgtctcttatgactacaaatagtacgaatgggtcggctgtggtggctcacacctgtaatcccagcactttgggaggccaaggcgggtggatcacaaggtcaggagttcgaggccagcctggccaacatggtgaaaccccgtttctactaaaaaatacaaaaattaactgggcatggtggcacgcgcctgtagtcccagctactcgggaggctgaggcaagagaatcacttgaacccaggaggtggatgttgcagtgagtcgagatcgtgccactgcactccagcctaggcgacagagcgagactccatcttaaaaaagaaaacaaaacaaaacaaacaaacaaacaaaaaaccccagtggaactgtgagagagctgggctttgaaccctggcagcctggctacaggggccattcttttaactgcttcaccagctgcctctctttctcacatgtccccctccctcagctgcaacgcctccccaccccatggtcctctccctccctggggatctcgatgcttccctgatttagaactgcaagtgcgtagacttatgctgattctatgcaatcatcttcagttacatttaattttagtaatttctccccttcatctgtccccccacaggcacccactcttatgtgcttaatttttggccttccaatctttctattcttttatcaagatccctgtgtatccttgcagttagttttgctgtatgtgggtgtgtgtggtgtttttttttttttttttttttgagatggagtctcgctctgtcgcccaggctggagtgcagtggcgcgatcttggctcactgcaagctccacctcctgggttcatgccatcctcccgcctcaggctccctagtagctgggacgacaggcgcccgccaccacgcccagctaattttttgtatttttagtagagatggggtttcaccatttacaggatggtctcgatcttctgacctcatgatccaccctcctcggccccccaaagtgctgggattacaggcgtgagccaccgtgcccggcgctgtatgtgtgttttaaatttgtagagtcgttgttaagctacaaacctcattctctttctttctttcttctttttgagagctctctgggtggctatgcttatttctagctggagatgagtgccagagtctgccccggttcaagttccatcctcactgcttattggatgaatgaccttgggcaagttacttaacctctctgggcttcagtttctccatttgtaagatgaaagttgttaaataatggtcactttctcataggattgttgcaagctggttttttgtttgttttttagagatggaatattgctctgtcacccaggttggaatgcagtggtgccatcatagctcactgcagcttcaaactctggtacttatttggtcttgaaacccactgggaaacagtagaacagtgagttttgcaaaggcaggaacaaggaattgagtagagggtaactccttatgctggaaggtcctgggctccagcgatcctcctggcttgacttgctaaagtgcaagctgatatcctttttttttttttttctgagatggagtcttgctctgtcgcccaggctggagtgcagtggcacgatctcggctgactgcaacctctgcttcctgggttcaagcaattatcctgcctcagccttccaaggagctgggattacaggcatgcgccaccacgccccgctaatttttgtatttttagtagagacggggtttcaccatgttggccaggctggtcttgaactcctgacctcgtgatccaaccacctcggtctcccaaagtgctgggattacaggcatcagtcaccgctcccagcccaagctgatatcttaaagcattcagcattgggcatttactgagcaatacactgatgttagtttctccctcttttacattgctgtgtagtattccactgtgtattccatattctacttctccaaccctaatgatggacatctacttctttccaactccttgctgcctaaattgcactccaatggacatcctcatacaaatctcatttaagggcctgttggacagtgtgataattgggtcatcaggcatcctcacatttaatttcttaaagtattgctggattgttcgccagaagggatgcacctctttggcctcctaccatccatggcaaatgatccattcttgcatatattcctccagaacttgatgttcttagactgtctaatttttgccaatctgttggatgtcagagaatgaatgtattgctttgatactttttttcctttttttttttttttttttgagacggagtctcactctattgccctggctggagtgcagtggtgggatctcggctcactgcaaactctgcctcccggtttcacgccattctcctgcctcagcctcccgagtagctgggactacaggcgcccgccaccgtgcccggctaattttttgtagttttagtagagacggggtttcaccgtgttagccaggatgatctcgatctcctgacctcatgatccgcccgccttggcctcccaaaatgctgggattacaggcgtgagccaccgcgcccagccctttcttttttttaagacggagtctcgctctgtcaccctggctggagtgcagtggtgtgctctcagctcactgcaatctctgcttcctgggttcatgtgattctcctacctcagcctcccaggtagctggggtagccacgcctagctaatgtttttgtatttttagtagagatggggcttcaccaggttggccaggctgatctcgatctcctgacctcaagtgatccatgcgcctcggcctcctgaagtgctgggattacaggcctgagccacagcgcccggccttgatactttcttatgtagatcagcttagcttcttcaggtttcctcggtcttcatctctacccagagttaccacaaactaatgtgtgtgtgtatataaggctttcaatatgaacccttcaatattatatatgtacattatatatatatccacatacacacacacacatatgtatatatacacacacatatatatatatataatagtttggagacagggtctcgctctgttgccgaggctggagtgcagtggtgcaatctcagctcacggcagcctcaacctccttggctcaagtaatcctctcaactcagcctcctgagtagctgggaccacaggcatgggccaccacacttgtctaatttttgtattttttgtagagtcggggtttcgtcatgttgcccaggctggtctcaaactcctgagctcatgcaatgcacctaccttggcctcccaaagtgttgggattacaggcctgagccaccatgcctgggccaaacactttaatattttaattgctgtcacagtagaaaaggaatcataatagcacatcccttctaaactgttatgacgattcagtgaatgataatagccacggtttattatgtgtttactacacggcgtgtgctgtgctaaactctgtatacatttactcacttatttcctctaaaagctctgggaggtccctgctgctgctatcgcccccattttatagaggagaaaactgacacatgaagaagttgactgcaagaagcagagctggaattgaaatccaggcagacaggctaactgaccatctcactgcctctcaatgagcctatgcaggaaaaacacacagggcttcacaaatattctgtatcatcccacctgtgatactcaggcagggcagtccagaagggcttggggaacgtttgctgattgcctctgcaaatttcttttttcgagacgagggcttgctctgttgcccaggctggagtgcagtgtggcacgcataatcatagctcactgcagcctcaacctccccggttcaaaacatcctcttgcagcagcctcctgagtagctgggactacaggcacacaccaccacacccagctaattttttttatttttagtagagatagggtctcactatgttgcccaggctggtcttgaactcctgggctcaagtgatctgactgcctcagcctctcaaagtgctggaattacaggcatgaaccactgcacctcctccacaaatttcataatgggttgagctattgggacattttccgagcataataataattgcatgttgcatttgggagaaaaacatcattttagagcgtataaaacctgaaagggacctcagtgggttgttaccgcatctgtaaaaggttcgggtaagactcatggtccctctcctttccagagcccctctgtttaccacatcaaagcatttataaccataatcatcacagccagattctttatttatttatttattttgagacagcgttttgctctgtcgcccaggctatagtacagtggtgcaatcttggctcgctgcaacctctgcctccagggttccagcgatgctcctgcttcagcctcccaagtagctgggactacaggtgtgcaccaccatgtccatctaatttttgtattttcagtagagacagggttttgcaatattggccaggctggactcaaactcctgacctcaagtggtcctcccaaagtgttgggattaaaggcatgagccaccatgcccggccaacaggcaggtttttatgagaatccccaagagcagcacttctgcagggtacacggctgtcacccagctctttcctactctgcacctgcatctgctgaacgtggccggagaaaaacacataatacagtggtgagactgagctcaccacaatttcacgattactcacctgggggctggggactgcctgccaacctcagtcctgtctattcactctcccaccctcctgggaatctatttcctacctgtggttccctcctccaaccttgcccacctcctctccatcctcaccctcacccttgaccctgttcttagttcctggagagaagagaagccatcaggaaacttcctcagattttcttgttttttttttggttttgttttgttttttgttttttgtttttaatggagtcttgctttatctcccaggctggagtgcagtggtgcaatctcggcttactgcaacctccgcctcccggcttcaagtgattctcctgccttggcctgctaagtagctgggactacaagtgcatgccaccacacccagctaattcttgtattttttttttttttttttttttttagtagagacggggttttaccatgttgatcaggatggtcttgatctcctgacctttgatccaccaacctcggcctcccaaagtgctgggattacaggcatgagcaccgcacccggcccttacgcaggttttcaacacatctacccacctacctgtgactattgttttcctctctcctgttaactgcagaaacactctcagccaaggccaacttctacatgtgtacacttggtccccttctctctcgcctactcagggacatcagtcaagcaagcctctgctttctctcctgcaccatcaattctccggtatctcctcgagcattctcattggcatcaaagcacattctaatacaaacctgctttttctttttctttctttctttctttctttctttctttctttctttctttcttactttctttctttctttctttctttctttctttctttctttctttctttctttctttctctctttctctctctctttctttctttctttttttctttgagatggaatcttgtactgttgcctgggctggaatgcagtggtgcgatctcagcttactgaaacctccacctcctgggttcatgcgattctcctgcctcagcctcccgagtagctaggattacagacacacaccaccatgcctggctaattttattattattattattattagtagtagtagtagtatttctatttgtatttttagtagagacggggtttcactatgttggccaggctggtctcgaactcctgactttgtgatctgcctgcctcagcctcccaaagtgctaggattacaggcgtgagccaccacgctgggcctctgctttttaaactccgtgtctgactctagcttcaatgttctgctgctctttataatacaatcctcagagactgggcatggtggctcatgcctgtaatttcagcactttgggaagccaagacgggtacatcacttgaggccaggagttcaagaccagcctggccaacatgggcaaaaccccatctctactaaaaatacaaagattagctgggcgtggtggccggcacctgtaatcccaactactcgggaggctgaggcaggaggattgcttgaacccgggtggtggaggttgcagtgaaccgagatcgtgccactgcactccagcctgggcaaccaagtgagactctgtctcaaaaaataacataataaaataaaataaaacaacacaatcctcagaggtatttgtactcatcttgtgtctctgattccttttcctcccaaatctgtgactttgccaaatcagctgttttttttttttttttttctcaggctggtcctgaactcctggggccaactgatcctcctgcctcagcctcgtgagtagccgagactacaggcatgtgctaccatgtctggctatttttaaaatgttttgtagagacagagtctccctatgtttcccaggctggtctcgaactcctaggctcaagtgatcctccctcctcagcctcccaaatagctggaatggcaggtgcaagccactgtgcccagctccaaatcagctcttggtgatgttaccaatgacccctatgtggctcagtcccgttgtccagtggcctgtcctcatattacttgagctccctccttgttgacagtcatgccttcctccttggtttattttctccctcaggttccaggacactccactctcaagacttcccttctggcccattggctcctctgcagtcttgcccgtccttggagtctttaaacattggagggctgtagggctcagttctggattctcttctcctttctctcttcactcactcttttggtgatggactcccacatcaatcagtctaggttggatcttatccctgaactcagactcatattcacctgtcctctcaatatttccactgggaagtctactgggtacctcaacacttccaaaaccaaatttctgattcacattctcctcctgtctccctatacctgcaattcacctaatctcaatacgtggaaacctcatcttggcatcttttcagatcaaaaaccttagagttggccgggcgcggtggctcacgcctataattccagcactttgggaggctgaggcgggtggaacacctatggtcaggagttcaagaccagcctggccaacatggtgaaaccctatttctactaaaaatgcaaaaaattagccaggcgtggtggcgggtacctgtaatcccagctactcgggaggcagaggcaggagaatcgcttgaacccgggaggcggaggttgcagtgagccgaggtcgcgccactgcactccaggacccttagaatcatttttgactcctctctttctcttcctcccgacactcaatccatcagcagattctgtcagctctaccttcagaatagattctaaccacttctcaccacctccgccatcaccaccctcgtggaagccaccatcacctctcattctaatgattttttaatctgttgcttaaattctttttttattgaggtgaaattcacattaacagaaaattaaccattttaaagtgagcaattcagtggcatttagtacgttcataatgttgtgcaatcatcacctccatctagttccaaaacatttcatcaccccccaaaggagacctcacacccattaaacagtgattacccattcgctccttcccccagcctctggcaccacaacactattttctgtctctgtggacttgcctcttctggacacttcatataaatggaatcatacactatgtgaccttttgtgtttgtcttctttcacttagcatcatgttttcaaggtttattatccatgttgtagcatctatcagcacttcatttcttttctctttttcttttgtttttgagatggagtcttgctctgttgcccaggctcgagtgcagtagcgcgatattggcttgccgcaacctccgcctcccgggttcaagcaattctcctgcctcagcctcctgagtagctgggattacaggcatgcgcctccatgcctggctaattttgtatttttagtagagactaatatggttttgccatgttggccacgctggtctcgaacgtctgacctcaggtgatccgcctgccccggcctcccaaagtgctgagattacaggcatgccactgcacctggccttatctgctcatagatttatggacatttgggttgtttccaccttttagctattgtgaataatgctgttatgaacatccatgtacaagtatttgaataccagtttttaattcccaggtatacacctaggagtgtaattgctgggtcatgtgttaattctgtttaactttctgagaaactggctgttttccatgtccacattattttaacagcctaagttttttaatttaaatttttatttttagagatcggttctcacaggctggagtgcagtgtcgaactcctgtcctcaaacaatccacctgcctcaacctcccgagtagctaacagcctattcttaatgcagccaccataatgatcattgaagacatgaatgagtaggccaggcggtggggctcacccctgtaatcctagtactttgggaggctgaggcgggtggattgcttgaactcaggcgttccagaccagcctgggtaacatggcgaaacctcgtctctactaacaatacaaaagttagccaggtgtggtggtgcatgcctgtaatcctgctactcgcggggttgaggcaggaggattgcttgaaacagggaggctgaggtttcagtaagccgagatggagccactgcactccagcctgggtgacaaagtgagaccctgattcaaaaaaaaaacaaaaaaagacatgagtaaaattatgtcctctctgcctaataccttcgatggctcccacctcactcagagtaaaacaaaaggcctcacaagggccgacaaggccttatataacctggtctcaggcatcctcccagacatcatcttctgtcacactccacacactcaatattgatgtctttgctgtttcttagaaacaccaggcatgttcccactacagggcctttgtactcactgtctcatcttcttgcaatggtccaccttggtaccctcaaggctggcttggccaggagcggtggctcacgcctgtaatcccatcactttgggagcccgaggcgggtggatcacatgagctcaggagttcgagagcagcctggccaacatggtgaaaccccatctctactgaaaatacaaaaattagccaggcatggtggcatgtgcctgtaatcccagctacttgggaggctgaggcaggagaattgcttgaacccaggaggtggaggttgcagtaagctgagatcacgccattgcacctccagtctgggccacagagcgagactccatctcaaaaataaataaataaataaataaaaataaaaataaaaaaaataaataggctgggtgtggtggctcacacctgtaattccagcactttgggaggctgagataggtggatcacttgaggtcaggagttcaagaccagcctggccaacacggtgaaaccccatctctactaaaaatacaaaaaaattagccaggcctggtggcaggcacctgtaatcccagctactcaggaggctgaggcaggagaattgcttgactttgggaggtggagggtgcagtgagtcaggcgccactgcactccagcctgggcgacagagtgaggctctctctccaaaataaataaatgaataaataaattcctggctcagtcacttgcttcaggtctctgctctaaatcagcttttctgagacatcttcccacccctctaacccccagttccatccacttcactctgctttattttctctgtagcacttatcaccccggacctggacatttctttctttcttttttttttttttcttttttttgagatggagtctcgctctgtggcccagtctggagtgtagtggcctgatctcagctcactgcaacctctgccttccgggttcaagcgattctcctgcctcagcctcccaagcagctgggattacgggcatgcaccgccatgcccaactaagttttgtagttttagtagagacagaattttgccatgttggccaggctggtcttgaactcctgacctcaggtgatccgcctgccttggcctcccaaagtgctgggattacaggcgtgagccaccgcgcctggcctatttctttactatatgttattatttgccttcctttcactagggtatgagcttttcctgtttgttaccagatgtttctacctccagcacccagaaaagtgcctggaacatagcaggtgctcaataaatggcctgacaagtgagtgaagaaataagtgaagcaatgaattgaactccacttacagatgaagaaagtgaagttcccagaagaggcatgacttgtgggaggtctcacagctggcaagggaaagccttcagattctaatccatgtttcctttttttttaattgttatttatttattaattattttcttagagacagagtcttgctctgtcactcaagctggagtgcaggcatttatgggatttagctgaggggaaggtgaagtgagaatacatttagattgggtttacagggatatttttatgtggttcatagatacttctcggatacttaaaccacctaattagttgtcatggcgtagaaatggcttcccggaatgcttctgttgtgtaagttactaactcactagatgcgaggccacagcctactaaatggcatgaatgtatcttttagcggctcattccagaagcatctgtgtaacagaaatgtcaggaattgaaaggaagcctgcgcggtggctcacacctgtaatcccagcattttgggaggctgaggtgggaggactgcttgaactcaggagttcgagaccagcctgggcaacatagtgaaaccccatgtgtactaaaaataaattaaaaaaaaattagccagatgtgatggcgtgtgcctgtagtaccagctacctgggagggtaaggcaggaggatcacttcagctcaggagttcaaggctgcagtgagccatgaacatgccactgcactccagcccagcgatgaagcgagaccctgtctcagcaaacaaagaaaccaacaaacaaaaaattgaaagtattgagccagaagttagtctgtggaaacattttccaaaacatagttaacatgtgaatgaaactttatgaaagtttttctttttttttttttggaggtggcatctcactctgttgcccaggctggcgtgcagtggcacgatcttggctcactgcaacctccgcctcccgagttcaagtgattctcctgcctcagcctcctgagtagctgggattacaggcgtccgctactgcgcccagctaattttttatatttttagtagagacagggtttcaccaggtggttcaggctggtctcgaactcctgacctcgtgattcccaaagtgctgggattacaggtgtgagccaccgcgcctggccagaagtttttctagatttccaaaagacttcaataacatcaccaatactgatttgtgaagctgaaacttgttctaaattataatgaatttttaaaaagttccatcaaccacgctagaggaaagataacttacttttctctttgtagacaaggatattgtgaaacatgcagctgaaaaagtaggaaacatcacagaggtgtgtcaggcagaaaattaataaaaacattacgttatcctttgggattttgcaatgtttgtggtatttggctcttttaaatatgtaatttgttattatttcatattctaagtaaactttcatgtcagtttttttttttctttaaactttattttcctttcttaaagaggtccctcctcccccatccccgcgctcaattcctttagctggatccttccagttcatgactgatcggtttaaaatatgggtcgttcaaaagccgtgtgaacccgggctagtggctatacctctctgagactgttttcttagtggtaaaatggaaatcataataactttgcagggctgttataaagtttaaataagccaagtcctgcaaaatgcttagtgcaggtttggaatgcaccaagcgatgacaaatctcaacctgtctttatgctgagaccactccccagtttccggagccgcggccactatctccccatgcgcatgcacacccggctctcccttccaggccctccccaccacgtgggcgcggcctaccctcccgcagggggtaataggtggagtcaaggggctacttccgggattctttcccttccactctggggaacaacctttttgtatgactggcagcattattagccagtagtgattagagaagagcccgacgttaggtgcctcccccaacccatttgggacagcctcttcttagttagccaattggaagttttggagggcgggttctcctctgggggagggacagagtgatgggcgtctcttttggctaatggaaacttggctgctggtaagctgtgaccaatcagaagcgagaacgccggatcctggggcggggctggagcttcgtcagttgaaccgctcgcgaggagggttgctagtggagaaggtgagaggccgcgggagtggcggttgcgcgggccgtggtggaggtcttaggtggaggggaaggggcttctctcgggggagagtgggctgcggtgggcagctgacctggccttgtaggaatcgggagggagggtgccctttaacaagggtaggcgcttgattgaggggttgtgaggctgagcgcagcatgtgagttgggggtgatctgtatatcgcaggagggtcttcaatggggaaagttgtaaagcaggagacagcagatggtaaaatatagagacgtccttggaatgcagcgtggcgatttagtaggaggttttaaggcagagggttattacagcgcactatgctttacaagctttgatttgggtgaaagtcgtgggaagaagcaatattgaggaagggagggaaggagacctccagggatgagcatgtactttaaagagatgtgaagccctattatgcctgtggcgtttgctatgtgctgtgcacctgccaagtgttttaggtgaattaactcttaaacttactctactgatggttaagaatgtgggctctggcgtcgggttgaatcccgaatttgaatcctggctctgccactgatcattactgtggctttgggccagttgtttaacccttctgtgcctcagcttcatcatcagtagaatgacatcatctctgtctataccattggctagcttcaccctctttatctaatgagaactcccacgtgtgtatttccagcctggatctctgccctgaactccagactcatatcatggccgactcttctctctttggaagttcatctgacattcagacataaacttgtcccaaaccaatcttgcgatttcttcctttcaacctccaaacccagttgatgggacattcatcctgccaggtactaagatcaagaagcttggagtgttcttttttttttttttttgagacagagtttcgctcttgtagcccaggctggagtgcaatggcgcgatcttggctcactgaaacctccacttcccagattcaagggaattacaggcgcccgccaccacacccagctaattgtttgtatttttagtagagaaggggtttcactatgttggccaggttggtcttgaactcgtgacctcaggtgatccacccgcctcagcctcccaaagtgttgggattacaggcgtgagccaccgtgcctggctagcttggagtcttcttcacttctcccttttgtcttacttatatatggtctagcagatcgcattagctctgtcttcaaaacacatccagaatccaaccatgcctcaccagctcctttgctaccactctggcctcagtttgtctcctgctcttacctggtttgttgcagtggccttccaggtgggctctctgcctctcactgttagggggatactagtagaacagaagtcaggtcaggttgtttctcctttcaaaccctctcctggctcccacattacactgcaaaagtcttcaccatatccacgaggccccaacctattgggttcctcctcctccctcccctcaactcccatcacttctctcattcccctggctcactctgctgcagccaccctggcctccccgctgtcatttgaacatagcgaacacattgccatctcagggcctttgtactcgctgtccctgaacgcactgccacctcagggcctttgtactcgctgtcctgtccttctggatcaggtcttttcaggtgtctgtgtggcttcttccacacctctttcaggtctccgctcagacgtcagcttcacaaccaggcatttgctaaagtactactcaagctaaaataactcctgtcactgtatggcccttcacttggctttatttttcttcataacaccactacctgatatagattattattattattttttttgagatggactcttgcgggtcacccaggctggagtgcagtggcgcgatctcggctcacggtagcctccacctcctgggttcaagtgattctcctgcctcagcctcccaactagctgggattacaggtgtatgccagcatgcccagctaatttttacatttttagtagagacggggttttgccatgttggccagggtggtctcaaactcctgacctcaggtgatccacccacctcagcctcccaaagtgctgagattacaggcgtgagccactgcgctgggcctattattattttttgagatagagtctctctctgtcacccaggctggagtgcagtggcctcatctcagctcactacaacctacgcctcccaagttcaagtgattctcctgtttcagcctcccaagtagctggaactacaggcatatgccaccacgcctggctaatttttgtaattttagcagagatggggtttcaccatcttggccaggctggtttcgaactcctgacctcaagtgatctgcccacctcagcctcccaaagtgctgagattacaggcgtgagtcactgtgcccggtcctcacatcaattactgttggtttatatccactgggcttcttggacctccccactagagtgtttgactccatgtgaatatggaacccagcacctagaagagcacatggtgtttaaaaagtgttgcttctcctatactgtcctcaccaccctttggggtctccctgtggtatggggcagggttgctgaactaggagggtcatgtgtggggtggtagggtcggaggtgggggaataaactgggcagattgtggcgcccaagggcagaaggaacctttagtgtctgaaggaacttggaggaaatgcagatttctgggcccacccccagagtttctgcttgtgtatagttgggacccgacctaggaagctgcattttcataagcacttgtggtaaggattatgttccttggccatcactgtgagaaacactgttaggctggttcagagtttgctggggccactgtggtgattgagacagctcctgacccagcctgggagtcagggagggcttcctgcaggagaggggattggagctgagacctggaggatgacagggaatgagccgaggggagaaaaccttggctgtatccccagtgtctagaaccccattccctggcatctcccgttaaattcacaagcagtccctgaagatacaagattgattaaaatggctctgccctcacgggctcctggtctgtcaaataatcaacagatcacacagatggtaacagggagtgccagccactgtttgaagcaccttatatacactaaataatttagttcaacaacaaccctataaggtaggagctcttattatcccgctttactgatgggggaaggcccagagagggcaagtactttgcccaaggacacaccaaggagaaaggcagctggaatctgaacccagaagtacccagcctgcagcatgtgccatgcttaaggtgtgaggccgcatttgggttagttctgggaggaaacaggaggtggtcagggaaggtcagctgggtaaggggaaggaagacgaatgtttctgtctttcatggtgggatcctagacaagcctcagtttcatcctctgtataatggggatggttataatacccaccagagagcagaatttagggtgagtcattcattgggttaataagtgtgcatggtccttatctaaggcaaaagtttgcctttgagagacagtgggagagggagttgatgccccagggggaactggggtgccgcagtgtgcaccgtagagatttcattgcttggttccccagagggcttctctgtctctacagtctatggggacaatgtggaaggctttggtctgtattctggggcagtgaagggggggttctatccagcctcaattcacccacgtggtggggaggtgaggtcagaatggggtcgggaagggggtcatccaggccaggccacgcgtgtgaatgtggggcggagggctgctgcaggagagagcccatctagggtatggctgggctggaatatgtgttggcggtggtggggagctgcagagtgtggggaaacagccatcaggtgtgggctgccaagggcagtgatttgcccgtgtctggtatgggaggtagtgatgtagatttgtctttggtgagcccagcgtggagagttttcagctccggccccggggtaagagctgtgaaatctgtgagctatctggggagagccatttggaaggtggagccaggggtggtgatgtaacgctggaaaggaaaggggtcatcctagtgaatgatgagagggagagagctgggggctgaaacactgggtgtaagtgtgccagcgccatgatgtcatgaggcccgagaagtgggtcaggtgtgtgggccaggatggggcctggagggcagccgcacagtgctcgcagggatggggtggtgacgtcatgggttggtgagggcggggcctcgaaggcaccgctgggatgcgtgaggtcaggaaggaggcagaggctgagaagaggaactgggagaggctcaggactggaatgaaatcagccaccaggatgagccactggtcattccgaagcaaggatggaggatgcaggtagagggacagggtcagcggcgggaggggagagggggctcagggtccggggaatcctagaagtggcggtggtggtggggtcagtggagaggaggggttgttcagagagggctctctaaagggaagagaggtggaaaatatgtgtgcgggtggagtgggggttgggggtggggttacaagcaatttgggagggaacagaatccaggtgaaatatgggagtgatggaatacaggctgaaagtgggatgtgtggagcagaaccttgagcaaatatgcgggaagaatgcagttggaataacggggtgcattgaagttgaatatgcgggagccctaggagaccgtgggtggctggtgtagggaggagagtgcggctgcctccctgcccccaaatctgggagagcaggatggaatgaaggggctttggacgggagagagggggctggtttccggggaatgtagcatgagggttgggctggaatatgtggagtgggaggttctgcagagaggaggggaaggggagtccagaattccgtggccatctgggggacaagtgacgggcagctggggtcagggaggccgtgtggagctggcacgggtgtgggatttattccatcagcagttactgagcacttaggacatgcctagaggaggggaaggggccgggcagcgggtgaagtttgtggaggtgagagaggtgtaagtgtgcaaggggaattgagtttaggcagagtattcggtggctcagtgtctgggatcagggcggggtgggggctaaggacaaggcaatgggatgccgaaaggggctgctcttcgcggggtgggtatggggggtttctgccgagcagtggggaaaggggagttggcggcggggatgcggtgtggcgggcccccttcctctgtgcggtctcctcccgggagttggggaccacgagtgggggcggtgatgctgtgcggctcctcaggtgttcagttccgtgggtgcctcctacgccttggtaacccggacggtgtcgccgctgataggttctgggagccggagggggtggggttgatgggcggggtttagaacacccagtggggcggggccagtgctgccacgcactgcattggggtcaggggatgtgggatatgcggcaatttgtttgcagcaagatcgagattattattttttatttatttgttttttctgagacagaatcttgctctgttacccaggctggagtgcaatggcatgatcttggctcacagcaacctctgcctcccgggttcaagcgattctcctgtctcagcctcccgagtagctgggattacaggcacctgccaccacgcccagctaatttttgtatttttagtagagacgaggtttcaccatgttggcgaggccggtctcgagctgacctcaaatgatccaccctcctcggcctcccaaagtgctgggattacaggcgtgagccaacgcacacggacgagatcgagattattaacctggacttatgaaccatcagagaatgaaagcacaattgccagaatgtgaattttccaggggaagggggtccccgaattcatcagcccttccaaagcactcttctcccaaatgaagttaagagctgtgatctagagagaggtgtctgtcaggaggtctagggcctacgccattgcccttgggcctctgagaaaagagatctgtggatgggcctggggggtggtaatttgggagccactgaaatgaacttgcaaaaggttttgggactattcatttatctgcagaaggctcagaaatttcattagattctcaaaggctcaaggactctaaaaaggttaaaaatcccttacctggagtttcaaggatcatcttttttgcctcacaatattgtattttctgatattagattttattttattttttgagatggagtctccccctgtcgccaggctggagtgcagtggcaccatctcagctcactgcaacctctgcctcctggcttcaagcgattctcctgcctcagcctccggagtagctgggattacaggcacggggcaccacacctggctaatttttttgtatttttagtagagatggggtttcaccattgttggccaggctggtctggaactcctgacctcatgatccacctgcctcgcctcccaaagtgctgggattacaggcatgagccaccgcacctggcctgctctgacccccttttaaaagcttggctcatcctactccaatacccccgtccctctttccagcttgacttttctccacaaatgtttgctgaatgaatgaatgaataataataaatatataatgagtataagacttaataaattaatactaatattaatcatgattctttttttggccatcatgtatttcttttctttcttttttttttttaactgagtcagggtctcactctgtcacccagactggagtgcagtggcaagatcacagctcactgcaagctctgcctccagcctcccgagtagctgggaccacaggcatgcaccaccacacctggcaatttttttgtatttttagtagaggtggggtttcaccacattgcccaggctggtcttgaactcttgagctcaagtgatcctcctgcctcagcctcccaaagtgctgggataacagttgtcagccaccgcgcccggcttggcaatcatgaatttctagtatccagcacatattggacacagcctccaggtcacagtaccaagtacttttatacatattgcccaatgtaatcctcacaacaagtccacgaggttggtgccattattatacccattttccagatgaggaaactaaggcacagagaggtgaattcgctttcccaggatgccacagctggtaaatgatggagccaggatatgaggcctggccttccaactcatgagcctgggctctgagctcctctaggtttctctctcatctccttctccagcaaccttggccatggaccagccggctggcctgcaggtggactacgtcttccggggtgtggagcatgccgtgcgggtgatggtttctgggcaggtgctggagctggaggtggaggaccggatgacggctgaccagtggcggggcgagttcgatgctggctgtgagtgtgcctgcctggggtgggctcacctttcctctcctgggatcagcttctcccagaatatcaggccaccctgaatcctgcccacctgcctcttctttgtcaccagaaactctccagtgtggggaggggtgtaggtcttgttgctcaagccagagacactggagtcgggtagaattgcagagcttaggtgcattgccctggggctgggcaagcggtcagacctcaggagagacttttctccccacccagtcattgaagatttgactcacaagacagggaacttcaaacagttcaacatcttctgtcatatgctggagtcagccctcactcaggtagggcccgggttggcgggttggggtgggaggggggttctgtcttccaggttccaggggggttgatgcccatctgatgtatgtaagaccctctaccttctctttcattgtgggaagagggcgatcattttcttcttttgccaagtgtaaatgcttcattttgaacttaatgatagttattctcatgtagaaaatttaggtcacagagaaatataaagaagaaagtaaaaatcactccagccctaatactcgcttctgttaatattttggtgaaaatcactccagtcctttctccatgtctctgtttgtttccaaatacgtgtgtgtgtgtgtgtgtgtgtgtgtgtgtgtgtgtgtgtgtatgcatttgcagatctgtaattatatatagtttatataatttccaaggtattctgcaacctgctttttttggtttgtttgtttattttttttttgagatggagtctcgctctgtcgcccaggctggagtgcagtggcaccatctcagctcactgcaacctccgcctcccaggttcaagcgattctcctgcctcagcctcctgagtagctgggattacaggcgcacgccaccatgcccggctaattttttgtatttttagtagagacggggtttcatcatgttgactaggctggtgtggagctccggacatcaggtgatccacccgcctctgcctcccagagtgctgggattacagacgtgaaccactgcgcccagcctgcaacttgcttttaaaggattcagcaatatctcataaaaatgtagtcacatcagtgaatatagccattcattcatttcatttgctgagcattgacagtgtgtcagtcattgtgggggacactggcgatacagcagtgaacaacagacaaaacccctgtcctcatgaggctgacattttggagagacagacaaatgaaaaaatacataatgtcaggtatttaaaagtttttgtttgtttgtttgagatggaatctcactctgtctcccaggctggagtgcagtggcgtgatctcaactcactgcaatctctgcctcctgggttcaagcaattctcctgcctcagcctcccgagtagctgggactacaggcgtgtgccgccacacccggctaatttttgtatttttagtagagatggggtttcactgtattggccaggctggtcttgaatacctgatctcaagtaatcctcctgccttggcttcccaaagtgttgcaattacaagcgtgagccaccgtgcccagcctaaaagtaataatcagggggaagaagcaggttagaacttagagtgacagggatgggtggtatttagatatcttttttttttttttttttttttttttgagacaagagttttgctcggttgcccaggcttagtggcacagtctcagctcactgcaacctccgcgtctcgggttcaagtgattctcatgcctcagcctcccaagtagctgggactacaggcctgcccaccatgcccagctaatttttgtatttatttatttattttttttgagatactatctgtgtagcccaggctggagtgcagtggcatgatattggctcactgcaacctccgcctcccgatttcaagcaattctcctatttcagcctcccgagtagctggaattacaggcatgcgccatcatgcccggctaattttgtatttttagtagagacggggttttgccatcttggccaggctggtcttgaattcctggcctcaagtgatccacctgcctcggcctcccaaagtgctgggattacaggtgtgagccaccgcgcctggcctggacaagcgatagtttcttaaaggttagttgcaatgtggaatctgcatcctcatcagtgaactttttgtattgttacattaaattccactgacttatcttgcattttgtatggatatttttttacctgtggatgatcttgtaacatcatgcattggtcatttggaaaatattggttcactaagttgtgcagattttccaaatgttgacacatttccttatataatatccagaagtcacatttgttaatatcctcaccgatttccccaggaaagtctgtgaacaccgagaagctatcagacacccagtggaagatacaagttttccaaaattctaatttcaagtgcaaagcttgaattttgttattggcaagacatcctgttagctgtttttcttgaagtgacaggctcactttgttcgtttttgagaaaatttctgccagatagcccgagtctaaataaccatagttttgtctgtcagtcgtttttttttttcaagtaaaaatagtgttctatgaaaagtggctaatttagctcaaaactcagatacagaagtgctttttcccgagaccatcgtcatactttggcgtgcacagaagtacttgatgtgtacttcccattttcttgctcaacataataaagagatgtgtgctctaggggctgaattcaataaaattaataatttttactgcttcatcaagaacattccgatgtttcatttcctgtgttttatggttgatttgcttatttacttgtttgtttatttctcttccccagccccccactgagactggggagatacaataacctccagtaccattcggtgccaggggcttgatttctcctaaggcaccagcagtttttcccaccattgcttttgtaccattcgcgcacatgtcaacacagtgaaaaagacaaatgacgtctttgtattattatgaaagtagctttgacctcagtggagatccctgaaagggtctcgtggaccccccagggatctggagacagcactcagagagtcacaggtctaagctgttctctctggttgagcatttaggttctttctggtttcttccttcgatgaagtccttgtgtctgccctaggacagggccatgttgattgccagccttcgcgtaggaaagcctagcccgcctagagaacgggaagggctgtggcccaggtgtgtgctaggtgccctccgtgtggcagtggcgggtgctgtggcagctcctcctctcctctcctgacagagtagtgagtcagtcaccctggacctgctgacctacacagacctggagtccctgcggaaccgcaagatggggggccgcccaggctccttggcccccaggtcggcccagctcaactccaagcgctacctgatcctcatctactccgtggagtttgacaggtggggagaagggtctggctccagggccaggctggtgggcggggtgggagaggatgtgggtaggccttaggaacccctggcacccaggcaaggtgatattggttaagccttgccttgggaatcttccctgttggggtttgtatcatttagtattgtgtttggctacaagtagcagaataaccatcaccagtgccctaaacaaacaatacatcaaacaaataatacgtcacgtaacaagatgtctaggtaggtgtctgccacctgtttaacagttccactagggactcaagctctttcttttttatttttttccttttactgtcgttaatgtgttggctttttttttttttgagatggagtctcactgtctcatccaggctggagtgcagtggtgtgatcttggctcaccgcaacctctccctcccaggttcaagcaattcttgtgcctcagcctccagagtagctgggactacaggcacccacaaccacgcctggctaatttttgtatttttagtagagacggggttttgtcatgttgcccaggctggtcttgaactcctggcctcaagtgatcctcctgcctcagcctctcaaaagtactgggattacaggcatgagccaccacgcccggcttggccttttgacttcatctttatctcttcatggccacaaaatagctgctggatcctccagacattgcatctatatcaaggcaggaagaagagggacagggctgagtttgttaattgcctttgctgtttttatcaggaaaaaaaaaagtgttcccagaagactcccaacagatttcctgtaatatgtggccagaggtggtcacatgcaagggatgctgggaaaatgaatatctggctttctagcctttatagggggagggtagcaagagagttgggaatggcagttgtgtagctaggtgaccgtgtctgtcccatgtgttagtagccactggatttcttagtggaaagttaccaatcctctgtgaatagcatctcatggggccgttaatcacaatggctcacctttccccagccaagccagggtcacccaggccaggccaaccagaatgccccgctgtggcatctgaattaggattgcgtttggctgcaagtaacatgataccagcattcccttcatcagcagtgggtgacaaggaagttcccccagactacaccagggctgccaatcccagtggtccccaaattgttatataagaggctttcacaggtggtgactggaacaaggggtccgggtacagggaggggccttgaggatgtgctcataagcctctaggacagtgcagtttttggaattgtgtgttttcgtactctgtggctctcagaggctgctgtttaccctcaggtgcattcttggcctctgagatgccacggttttaatcctccctcctcaggattcactacccgctgcccctcccgtaccagggcaagccagaccccgtggttctgcagggcatcatccggtcactgaaggaggaactgggccgcctgcaagggctggatggccagaacactcgggacacccgggagaatgagatctggcatctgcgggagcagtgagtcttggaggggtgggcagctggggcgggtgggggccctcccatcatgcaccgcggggcccatgctcggtcctgtggggaggatgactgtccttcgcccaccacgtattcttttttttttgagacaagagtctcactctgttgcccaggctggagtgcagtggtgcgatcttggctcactgcagcttccttctcccgggttcaagcgattctcctgtctcagcctcccaagtagctgggattacaggcacgcgccaccatgtccggctaatttttgtatttttagtagagaaggggttttgccatgttggccaggctgatctcaaactcctggcctcaagtgatctgcccgcgttggcctcccaaagtgctgggattacaggcatgagccactgcgcccggcctctgagcccctcttctgtacctttgtgctgggtggtgctggggacatagtggtgaccaagactatcttggcactgccctcctgggactctgagtccagggagggaggcagatgtgtttgcagacagtgaaggctctgggtggggtacctgaccctgcctggtacgggaggggtgttcttggcaaagggagcagcatgtgcaaaggttggggggaggtcgagctctatgtaggcgaatccaccttcatggggtgcaccttttgtgctagcccctccctgccactcacgtagtgcccagccctgggggagatgggtgctaagtatataaccacttgagtatatcattacagatggagatgagtagggcaggaaagggagcctgtgctgtgggaggctgtcacaggactccactggggtgtagggtgggtcaggcccaggggctggggaagtgttgtaggcagagggaacagcctgggcaaagtccttgtgttaggtgggaatgcggtgagaacaagggaatgaatgaagtgaaagaagcaaaggcctttggcatatatattcatgcctgccttgtgcttggttctgttggggagacgaatctggggcttgatcgctaccgggaagaggcctggctcgttggggaggactaataatatttttagtaataatgttaccagtaactaatgtttattgaacatttaactgtatgccagggctgctctgtgctttatgattaaattcattttatcctcacagccaccctacaaggtaggcactgctattatcaccgtttgacagaggcccagagaagttagggaacttggcgcaggtcacacagtgggtaatatggctaggctggaccttagatccaggcagccagcgccgagcctctgttgtttccccagctgtttgcactgttggtggctgcaagcccaggacagagcgctaagtgctgacccggaggaccagtccttatgggagctcatggggctggggaaccccgccggtctttggaggagctcgcctgtgtacggctgggccgaggaaggccgcagtggggaggccaaaatttatcctcaggatctgctctcaggctgtgtgtgtgtgtatgtgtgtgtgtgtgtgtgtgtgcgcgcgcgtttgctctgtctcaggctgtgtgtgtgtgtttctaggtttgtgtttctgggtgtgtgtttcccaagatggccacaagggggcgccctccaccctttggaaccaaccacaggagccttgagatcccaccgctgctcagtggcttcttatcttcctcttcccagccaggaattagggagtttgggaaggttctgagatttattcattcattgagccaacatttatggagttcatactgtgccaggcacactgcctgacgctagttaatgtttattatgctagacatggtctaagcactgtggatagattcttacagcctaacaggcgggcattcttattatcgtccctcttcacagatgagaaaagatggcctgaggctcagagatgtgaagtgaaactgcccagggccacccagcttgttaacaagtggaatagagttgaatgcagggcgcccggccacgcagcctggggtcctgtgcagtgaaccagacaggtggaggctctgcccccagaaaggtgggatccacatgggaaacggacactcctctacatgccaggtctgccagggctggtgctaggaaggaaaggtatagagggctgggagagcggagaacgtcaggggcaggtaggcttcccggatgagtggagtcgttcttgccaggagaagagggagagaaggttctgggaggtgagaactgcatctggctggagcctgtgggagagggaggcaggaggagaggaggggagaagtcagatgggcaggggctgaatagaaaggaaagctccttgttagagagtgtggggaaccacggattttaagaaggatttattaggaaaaattccagcaccacaaaagtaaacagtagtataatttgcacgtacttgtcccccagcttcaacagttacccacgtttgcccatcttgtttgatgtactgccaccccctgccctgtagcaaatcccagtcttcgtgtctcctctgtaaaagcatcagtgtgtatctttaacacataaggatataagtgctgccatcacatccaacaaaattcacaaaaattccaggatgtcatctgaaacccactgcgtatgcgttcacacttacacttctctgatcacctctcaaatgtcttttttgcaagtggtttgaattcgtcctgtatctaaatacggctgcacattgcagtttgtcgaggtctttcttttcttttctttctttctttttttttttttcagtcttgctctgttgcccaggctggagtgtggtggtacgatcttggctcgctgtgtccttacctcctgggctcaagcgattctcccacctcagcttcctgagtagctgggactacaggcacatgccatcatgcccagctaattttcatatttttttatagagacagggtttgcctgtgttgcccaggctgatcttgaacttctgaattcaagccatccacctgccttggccccccaaagtgctgagattacaggcacgagccactgagcttggctgatgtatttcttaaatctcttttaatttatatccccctctccacttttcatgctacttatttgtggaagaaatcaggttatttgtcctgtagagttttgcagtctagattttgctgaatttttccctagcaagcatactcagatggaaaaatgaaaaatagattttgctgattatatcgccatggtgtgtttaatgtccttctctgtcccctgtacttgcagtgaagtggtggctaaccctatataggtttaatcacatgtggggtaggttttggcaagatgcctcctttggtggtgttgagactgatgatttcagctgttgagagctggctccctcttttataaagttctcttcggcctttcaaccaatgcagtggttcactctggatatgcactcaaattgcccgggagctttgaaaaatctcagtgccctggctgccctgtacattcaccatttctttttctttttttgagaccgagtctcgcactgtcacccaggctggagtgcaatggcgtgatctctgctcactgcaacctctgcctcctgggttcaagcgattctcctgcctcagcctcctgagcagctgggattacaggtgtgtgccaccacacccggctgatttttgcatttttagtagagacggggtttcaccgtgttggccaggctgatctcgaactctcgacctgtctcaagtgatccacctgtctcagactcccagagtgttggaattacaggtgtaagccaccgtgcctggcctatttttctttttttaaaaattttgtgagcagtgaggagttccagggcaggccctgactcctccagacacaccacttacacctgaatctctgggatgggacccgtccctcctgcccaagagtcccactgcttccactacttaactttcttgttgtgaaaaataatatactccaaagagtataaaatataaatgtacggtttcacaaattatcataaagccagcgtacatgtaacaactacccaggttaaaaaattgaggctgggctcagtggctcacgcctataatcccagcactttgggaggccgaggcgggtggaacacctgaggtcaggagttcaagaccagcctggccaacatgatgaaaccctgtctctactaaaaatacaaaaatttagctgggcagggtggcgcatgcctgtagccccagctactcgggaggctgagacaggagaatcacttgaacccaggaggcagaggttgcagtgagccgagatcacgccactgcactccagcctgggtgacagagggagactctatgtggaaaaaaaaaaaaggagaaaaaaatcaaaagtagtcatttccccatagcctccgtatgtctttttccgggagagaccctcctgccccaaccatgctcccaaatgcaccagatctcactcacttgatttgcttatggttttgccagctgaactatgcatccctaaacaatatagtttagttgtatctctttttgcacttaatttaattttttttttttttttaagagacagagtcttgccctgtcacccaggctagagtgcagtagtgcagtcatggctcactgtcaactcagactcctgggttcagacaaccttcctgcctcagccttcccagtagctgggactacaggcacatggcaccatgccaagctattttttttttttgagacaaagtcttgttctgtcccccaagctggagtgcagtggtgcaatgtcagctcactgcaatctctgccttctgcctcctgggctcaagcgattctcctgcctcagcctcctgagtagctgggattacaggtgccccccaccagacctggctaattttttttttgaatttttagtagagagggggtttcaccatattggccaggctggtcttgaactcatgacctcaggtgatctgcctgccttggcctcccaaagtgctgggatgacaggcatgagccactgtacctggctgcaagctaatttttgtagagatggggatttaccttgttgcccaggcatgtctcaaactcttgggctcaaggtatctgtccgccttggcctcccaaagtgctgggattacaagtgtgagccaccacacttgacctacttatatgtcttttcttgtgatgaaaatcttagtttctagggataataacatatttatttgctttatcttaaacaataccagtgtaattactaataattgaattttgaatgaagtttaacatttccagggccgggtgcggtggctcacgcctgtaatcccagcacattgggaggctgaggcgggcagatcatgaggtcaggagtttgagaccatcttggccaacatggtgaaaccccgtctctactaaacatacaaaaattagccagggttggtggtgggcgcctgtaatcctagctacttgggggctgaggcaggagaatcgcttcaacccgggaggcagaggttgcagtgagccaagatcgtgccactgcactccagcctgggtgacagagcaagactccgtctcagaaaaaaaaaaaaaaagatttctttgcagttctttttggccttaggctatatcccgcttgctcaaacgatgtgttttagtcacctcctataattctccaatgtgccaccaactttgatatagagttaggtctgtttgggccagtttcttttaaaatttttgtgatggcatttgttaaaatttaattaattaatttgtataaaatatttttatagttccaaaactgaaaaagagggtacattcagagaggtccaatttcttacattttttaaaaaattatttttacttctggttttcttatttttttgagatgtgatccacctgcctcggcctcccaaagtgctgagattacaggcatgagccactttgtccagccagagaagtccaatttctgttcattttccccttccccataaataatccttttttcccccatagattttggtttattctgtaattttgaaaatataaacatataatttataattctcatttcttttatgaaaagggacattctgaacatactgtctgcaccgcactgtgtcacagcagtcactcggtgacaggacacagagatactctactttcctctttatagttttgtgggactcaattgagtagatgtattagaaattcaattagttctcttttaacatacattttggttatttccactcttttgctattacagattgtgctgcaatgaatagccttgtgtatacattttctcaaggaagggttttgagcatggtagttacctgatcaaatttgtattgtagaggatttcgtgactgggagactggcctggcgaggtgggaggaggagggaggcagtgctaggctttcagggtgtgtacagattgatgaaatcgtttagaattggaactcacatggctgtgttcccactccttcacccgcaccagggggaggagtgtgtgtgtgtgtcctgtgcgtggtggggtcatgtcctcttcgtgaggtgcatgggggtgatgtgaccacatccctcctcacacgtcgcaggggatatgataggaccctgcccctccccatggggtcagttgagactgatgagccgtgtacccccttccggggaggtgaaatgatgaggcgtcccacccccatggagtagtgggaatggggccatgcctctctctccagcgctctctccgcgtcttccccagggtgtcgcgcctggcgtccgagaagcgggagctggaggcgcagctgggccgatcgcgcgaggaggcgctggccgggcgcgcggcacgccaggaggccgaggcgctgcgcgggctggtgcgcgggctggagctggagctgcggcaggagcgcggcctcgggcacagggtggccggccgtcgcggccaggactgccgccgtctggccaaggaggtgagcagcgggggcccggggcggccagcgaggcgcggacctcggcctcagcctggacctccgcgcccctctcccctcccggcagctcgaggaggcgaaggcatcggagcggagcctgcgcgcccggctgaagacgctgaccagcgagctggcattgtacaagagggggtgagagcgaggcctgccaggcgcctgggcggatgggcgggccctgagggtgtggaggctgatgaggcggagcctaagggggcggggcggggccaggtagggtggagggggcggggctgaaggggaggcggggcttagcggaccccgtctggagtccagacaggatttgggtgcagtggttaggaggtggacccgggctgtgcggagatgcgcaggcttggggcggcgttcaggagggactgggaaagggatcgtgccctagggtctcctggtgcgaaagggtgcggcgcagcaggtgggatcagggtgaggtccgctggcatttatggggtgggtggtggaaaattggaaagagtttccggggagttgtggaagactccggaaagaagggtctgttgaaggcggtgtgttgaaaggatgtaggggaatgacagaggggtgttttaggggtccaattgggtgaggtctgggggggaagatatcgagagggtcatgggcccaggagtgcacgtctaggagttgatggggtaggcctgagggttcggagaaggtgcggtcggggaggagtctcgcgattgagtttgtcggggcgggcgggaagctgacagctgcctctgtggtctcaggaggcggactccgccggtgcagccgcccccgacgcgggaggaccgggcctcatcgtcccgggagcgctccgcgtcgcgaggccgcggcgccgcgcgctcctcatcccgggagagcggccgcgggagccggggtcggggccgccctgcgcgcccctcgccctcgcccacaggtctgtgcccctgccctgcggtagggaggggacgcactggcgctgccaaggcccgtctccggacctagccgcctcctctcccacgccgtcctaggtggtcgcgcgctccgcttcgaccccacggcctttgtgaaagccaaggaaaggaagcagagagagatccagatgaagtcagtgccccttcctccctcacctgcccctgtccctggcccgtgcccgctcccgggctctcatctctccacgccaccatcagtctccatcccctgccacctgctcgcttctcgccggataccccgcctgctctcccttccgtccgtcctacctcctcgtctgtgtttctgcgtgctttccgctcgtaggcctgtcacctcaggctttcgctggcgtggctgtgacctttaggggcgcagtgacccccttgcctgcaggagttgggcgtacagaccggcgtctcctttcttttttcccaggcagcagcagcggaaccgcttaggcagtgggggaagcggggacggtccgtccgtctcctggtctcgccagacccagccccctgctgccttgactggccgaggggacgcccctaaccgctcccgaaaccgcagctcctcaggtaactggcctggagctgggggctgccgggctaggcgggactgggcggggctgggcgggctgggaggcactgggcagggcgggcgggctgggagggcctgggaagcactgggcggggccagcgagggccagcggtcacgccctccgtctccctctagtggacagtttccgcagccgctgctcgtctgccagctcctgcagcgatttggaggatttctctgagtcgctctccagagggtaaaacttgaacttgggaaaaggatcgcctccaaagggtttctggggagactagaaacagtcttttgcagggaaattgggtgatggagcctgggggccttgaaaccacaaaggtcggggaggtgggaagtaccagagcctccccaccactggtccttggttactcctttttctcaggggtcaccgccgccgtgggaagcctcccagcccaacgccctggagtgggtccaatatggtgagtagaaggggcaacataaaccactggaacacagctgcccccatttcctgtgattccttcctggggatcaggtgcagaggcgactctgaatgcctttggcaatagggcttttttaagagtgcgtctcgctctttcaggctggggtgcagtggggcaattgtagctcacggcagctttcaactcctggactcaagagaccctcccacctcggcctatggagtagctgggactaggcttttttgggggggcagggtggggttgagacaggataagggggtggtattgtctctttatgttgcccaggctggtctggaactcctggcctcaagccatcctcagcctcctacagcgctggagttacaggctgggccagcgcacctggcctgggaacagcacgttttgagagcattagattggagaaggaataatgaggggcacgtgatgctctttagggctttggcttctgactgtcaggtcttgaaacctgtctcctcctcttcccagctgtatggttcaaggcagttctttagcctctctgtaccttagtttttgtttatcagttaaccagggttggtaatggcatcacctcacatgtgaggtgagggctctgtgaggacattaggaggttattttgcagataatgaatggccagtaggtgtcaggccttatttttccccaaggtccttaggctcaggatttccagtgggatttagggggacagaaatagagggacggtgggtgaccccctttcctaccttccccatcaccagaagtctccccccgtggaacgcagccaccatcagaaatctctggccaactccgggggctgggtccccatcaaaggtgagcctgggactccacatcccctctcccagccccaggacccgttggaatggtagtgcgggcagtggtatattgggcccaggaactccctggggcttcaggcccctcacagcccccatacccacacctgctctcacagagtacagctcggagcaccaggcggctgacatggccgaaatagacgcacgcctgaaggccttgcaggagtacatgaaccgactggacatgcggtcataacgtggagaaggggtactacccctccatcccccacccacttgctgggtatggtgtggggggtggggccagggtggcctccagccctgcccagtccctgccctggccccgtccctcctgctgcccctggggtctcaggtgtgtgaggccctgaccctgccctctccccaggcagtgcatgctgggagggaggatgtgtgcattttgtaaataaacatatttgccctggggacccctcagcttatgactaaagggtgagggtggagtggggagaaatgtggaggaagagaaattggggggtataattgggacctgtgtgtctgtgcctcggaggcagattgggactcaggcctaggaaaagcttgtacactctctaaacagtgcaagggcagacctgggaggagtagtgagcagcccgtccctaaaggagtccaagcaaagtttctgcgcaggatgcctttggctgtgtggtgggaaggaggtgtcttgcagcgtggttcactgcccaggaggacccccaggacccactgttggtgacatcccggccgccttggtgctgattcctgggctctgacctgagacctctgggttctgagctgtgatgttgctctcgagctgggatctccggggtcttggttcagggccggggcctctgggttccaagcaccagtgaggagagtgctgggaggggaaggggtgggagggctttggtcttgtgggagggagagaaggaggggaggtgtgtggtgggacctgctgaggaacacattttgagctacatctttattggagaaggagacagtggggtttttggccatgggaggggaggaatggggtgcggatcagcagggcctcagggggagcggtagtgtggccaattctggatgaggtggtagagctggttgcctggagagagtgtacgctgcacatcccggtgtcctttgagcacatagttggacctcagggctccctgagccacaccgcaggccagtagaccctgggctgcccggatggcctggggtgtgggcacccgatctggaggaggcagaggtaggagtcaggcaggggcttccccgaaggggaagtgatagcgtagggccccgtgtcagcccccatcccaactggctggacagtcactcacccatgtagttgcccatgaagctgatgccaatggacatggggttccataagtgacctgagtgggcacccgtgaagttccagccacggccctcgtatacgagcccgtcttctccaatcaggaagctgcatggggaggtgggggggcttgatgagtgagggagggtttcccgaggaggactcctcctccttcctccactcaccctgcctccgttactgccgtggtgcacacaacttccccagcatccttctcacccgttaatttcccacgatagtaacaatgactgtggtcatttattgggcccctgccatgtgccaagcacagctctgcatacacctttttccatcctcacagcaaccctgtgagtcactatcacccccgttttatatagacagaatcagagcggtagaatcacctgccccggggtcacacagcctgtctggggcacagctggggtttttaaccaggcctccatggtccccacccatgtgatcttgtgcgttgctctctcctgcctccctagaggatttgtggaagtcctgttttactgaatccttgcaggacagccctctgaggcagagacttttttttttttttttttttaagacggggtttcactcttgttgctcaggctggagtgcagtggcgtgatctcagctcaccgcaacctctgcctcctgggttcaagtgattctcgtgcctcagcctcctgagtacctgggattacaagcatgagccaccacacccggctaatttttgtattattagtagagatggggtttcaccatgttggccaggctggtctcgaactcccgacctcaggtgatctgcccgcctttggcctcccaaagtgctgggattacaagcatgagtcaccgtgcccagccaaggcagggactcttatcatcctcatcttaagcagagagagcagagactcagaaagcgacataatttgtacaagctactcagagccccctgcctctcagaactctgcctttgccccagcttgcttcctgccctcggggtccactgggggacaggatcacagactcaaagttggggtcgtaaccagataccgaccctggagccccagcacctgcctctttgaggttcccaagcctggcagcagatccttaaggctgattcattcagcacatctgattgagcgtgtctgacttggcaaatgggaatgaactagaagatcagtgccttggagctgcagtatgtgccaactcagcccccgcgctcacagtgtcattaatgacgcacagaatgtcggaacttccgaatcttgagtcccgaatctgctgcttaggaagccagctcccagaatctggccccagtgatgctggctgctgggactggctggttatggccctgctggtgatgctggctgctgggactggctggttatggccctgccatattcccggagcctggcatgatggtgctggggtcgggggtggttggttctccctggtcatttgttgcatgaatgcatctcattgaaacctcagccaccatcgccaagcgggtacagtcagaagccccatttacaggtgaagaaacgaggctcagagagagaaggtgacgtgacatggaaaggggattcagaacgttagaaccagattcggaatcctaaaagctgagggccagacagcggctgcttctgtatgtggtgatgtggacccgaggctcgggccttcgtgacctcatgggaacacttaggatcagagcgcctgagtcttggaaacaaaatgttgaagttggagtctttgataaaatcttgaactggaagggctgggaatacctttggacacttctagacttctctgggtgggttttgtgtgtgtgtgtgtgtgagacacagccttaggaggtcctgagaacatgtgtcccctgggtggggtctattgaagtggtctctggggacctgcatgttcctccaataagctctgcaggagattctgatgcttacctgggtctgagagcctgcaggattgaaagttccctccctgtggaaaccgtcaggctggactgcagcccattctaaggaggaggtagctggtaggcgtggccccggacctgcttcagcctgcttcagccggcaccccttacagtctgttctccccacagcagccagagggagtctcttgtacctacactagccctggtccctgctctgcggggggaagcctcccatggctcccatctcggagtaaaagctacagtcctcactgtggtccacaaagccctgcctggtcctgccctttcctcatttcattccgctcgcccggctgtgttcagccaccctgtccttcccacaggacccgcccactcaaccccgttggctttgcccccagcaccccctgccacctgcaggcctctgtctgctcccccatcccagagccaaggcagccactctcagggaggctttcccttgccccacccttccaaggagcctgtgtgggtctggtcccagcctgaggtcaccctccctcacctctttccttttatccatcgcctctatcaccgtctgaattcacctgtggccttggcttgtttctccctgctggtctttcaaccccaggaggctagagtggcaccgttctccatgccacatctggcacactgcctggcacatagtaggtgcctaatggtaatagcccgtggctttgcgggcccccgtgtgccaggcagttcctaggtgctttgcctgtattggctcatataaggagcagatgggccgcgattccattgactttgccgaggaggaagctgaagccgggaggacccgccccaggcctcagccagcaataagatgagctgaccctggaacccagctccgcactgagtcagcctggttttccgcctcctaacaaaggcaccaggcatcaggaaggggcgccttcataaggcgtcgcggacaccttggtgtgtgttaggcaaagcctgccccttcttcccgggagcgggagcggggcttggatttcagcccatccccccttctcacgcatctttgtgctgtgagcacctgccccggcccacgtggtgacccgaggaagaaatgaccttgtgaggttcagtaagctgctcagggtgtcagccaggtggcctcagcaccaggcctagaaatggtcccgctggcgggcacttgcacacctttgcctctgggatccccagtccagcccgtgcccccctgccacactcacttgtagcccacgtcgcaccagcccagtgtcttcatgtggtagtgctgcacattccgggcctgctgctggcacgaggcgggggtgttgcagctgctgcccgccgtgtgcgataccaccacatagcgtaagggcaggctcaggtgctgggcgcactctgatgccagggccttccactcgttccggggcactatggggctgcagcaggccgggtcttctgtctcctgagccgctccgagtcgaaggaggctggggagagcccaggcaagcagcatagagcggcgggacatagtggcagggcggcagggtccgggagaccgctaggagcgcccggtggaggggccgcctttatctgctgggggattccaggagtggcccggaaagtcttgcttcacaccctgctgggacttcctgctggcccagcagaccccagactcagcttccttctctggctgggccagggcgggatgcactgtggttggggtctgggtcacgcccacggcaatgacaggccccctcgctcagcagggagggacgcacaggcccctgggcgcttcgccccgccgtttctggaagacccggggccgggatcccggtcctgcttgtctctcctctcagtggaacattgaacaactcaacaggaacttacatcgcagaggcccggggcattggcacatcttctccccgcaaggactgaggtaacaaagctacccattttaaaaacacttccttcccccaggtccaagcctgatgccatttacgcttgcagcaaactcaagaggtgagtatctggaagtccatttcacagtggagtaaactgaggttgagagcagggaagtcacgggctgagacaccggaggcactggagccccgcgtctagagccaggctgcctgcatgtgaatcctggatatgcagtgtgtgagagcctgcaagtggtttttaaaaatgtgtatttaaaattttttttttaattttctattttataaataatattttcctttttttttttttttttttttgagatggagttttgctcttgtcacccaggctggagtgcaatggtgcgatcttgggccactgcaacctccgcctcctggcttcaagtgattctcctgcctcagcctcctgagtagctgggattacaagtgcacaccaccacgcccagctaatttttatatttttggtagagacggggttttgccatgttggcctggctggtgtcgaactcctgacctcaggtgagccacctgccagtgttccagagtgctgggattactataggcatgagccaccgtgcctgacctgtgtggtgtgttttcatcttctgtgttctgccttctcatatacattgtactcatgctgttactgaattgtgcaccaggcatctgtagcacttttcagaaattatcatatactcaacgacaagcttgccagatccatgttattattaacccctcttacagttgacggaactgaggcccggggggatgatcacatacaggaggtgatgaagccagggtttggctacaggctttctgcctgcagagttataaaccgtattctcctccctacaaacttatataaggacattaaaaaaaaaaatcaaaaccatgtgcatcaatttaccttttgtcacctaatatttcatgggcatctcaccagggcagtacatctaattctaatttattctttataatagttgcacaatatgctatagtatcagttcagcattgtggatcttttagtttttgaaggttttccagtattttctccacactacgcaaaatattttcagacatatatccctatgcactggtgcatttataagtaaattataaacacagagttattaggtcaatgagtatacatatttaattaatattaccagatcattttccccaaaaagccattaataattcatatttttcaccagtaatgttttggagcctcctcaccccgaccccagaagtgggtgttatcacttttttttttttttttttgagtcagagtctcgctctgtcactcaggctggaatgcagtggcacgatcttgtctcactgtaaacctccacctcctgggttcaagccattctcctgcctcagcctcccaggtagctgggattacaggcatgtgccaccacacctggctaatttttgtatttgtagtagagatggggtttcgccatgttggccaagctgatctcgaactcctgagctcaggtgatccacccacctcagcctcccaaagtgctgggattacaggcatgagccaccttgcctggccagtgttatcacttcttaaatttataagtataaagtgacagctcctttggcatttttatacccactcaggagactgggtatttttctgtatttgctgtctatatttgggcttgctcttttgtcaattacctgttcatatccattgcccattaaaaaaaattgggttgtttgcctttttgttattatttgcaaaatgaacaaaagaatcccataattgggatttttgacttcttgggtgtgtacattttgtgtatttcagtttttttagaagcattaaagaataatgtaatataaaaagtgtgtaaacacattttttatagagttgatagacttaatagagtagtgagcttatgagtgttcacgaagtgaatccacctgtgtatccagtgcctggattaagaagtagagctacacttaaaattttaataggaattggtaaatacaataccaaaaagattttagtatatatttttcccacaatatgatcagtttttaaatgttttactaatccaaagaacaagatctcattattgctttatttgcatttccttgaacattagagaggtgattatctttttacatatttatggctatcagcatccatcttcaaactgtctgttcatctcttctgatcattttcttgttgagttgtatatgggggatattaaccctatgtcttatcaaatgtgctgtaaaccctttcctctaatctgttaaaaaaatatctaggtttttcttttatggtttctgtgtttcctgtcttgccttaagagggacttttcacactaagattgtaaaactttttctatttaaaaaagattattttgtgttttacttttagatctttatctcggctaaaatgtatacttgcatgtggtgtgaggtaggggtctgatcttgtttccagatgcctagccgtttgcccaggttctgtttattatataggtagacctggttttaaatttccattctgccccttattagctacatgatcttgggaaattggatagcaattgacacagtcgaccacttcctccttctcaaaatacttatttcccttagcttttgtgatgtaagactgccttgattttccttctgcttctctggctggtctttttttctctctctctttttttcagagcaattcttccctcctggaccctcaaaccatatattttgtgctgagtgatcttatccacataatggcttcagccacagtcaaaatgcagaggattcctgtatttcaatgtctagtctggagctctcagttgagttctggatctgtgtatccacctggccacttgacgcctccacttggatgtcccacaggcacctccaatgcaaaatgactcatgaccttctcctccccatcagcactctcacaggagttcctgtctaaggaaatggtatcaccatcttcccattacaaaagccatacatttgagcaccatccttgactaattcctgttccttcctctgttgtacccagtacccaaaagaatgcccagcacatggtaggtgctcactaaatagctacttgattgaatggatatgcaacccaccaccaaggaatgccactgtgatgaattagaactcttctatctaattccattctctgcaccctggtccagacaccacctcctttcacctggattttgccctgcctcttcagtgacctcccaggatgcactctggcctctgtgaagccaaagctctgctcagatcttttctaaagtcaccctcaaaaatgagtcacatttttcattggcatctcttgattcctagaatgaggcccaagctcctccccatggccaacagcatgggctgcctacagtatgggctgcccccatcccagcctcaccttgcttactcccaaaagcctctttctgactcctgcagccactgtccccttcttgctgcccttgaacatgctttgactaccctgttcccttggggacttcagacacaccaggtataagttttaaatagaggaacctggaacgaattcaggaactttgtaccttagctttaagacaacaaaacaccaagccagccttttgtaaaaagacaggactatttacacatcacattcctttttttaatttttattttcttttttccctttcttttgcctgttctttcatttgaggcacagatcccttaaagacactaagaatataaacattagccagctggagtgaagccttccattgtgagagttttatttagtctgtatctttaaaaaaatgtatttacttatttattttttgagacagtttcactctgttgcccaggctggagtgcagtggcacaatcttggctcaccacaacctccgcctcttgggttcaagcaattcttttgcctcagcttccctagtagctgggatgacaggtgcccaccaccatgctcagttagtttttgtattttttttttttttttttttagtagagatgggggtttcactatgttggccaggctggtcttgaactcctgacctcaggtgatctgcctgcctcggcctcccaaaatgctgggattaaaggtgtgagccatatttacttacttatttttacatacaggtgtgagccatatttacttacttatttttacatacaggtgtgagccatatttacttatttttacatacaggtgtgagccatatttacttacttatttttacatacaggtgtgagccatatttacttatttttacatacaggtgtgagccatatttacttacttatttttacatacaatacaaacactttaaataaagttgaagatcatctccatggaccaggtggtcaagccgaacacccaggatccagctgtcaagttcagggtagcccctgagcttctcactctgactccaacagggtgagcttgctatccttgtggcacagggccttttgcattgtggatgatggagcggctcgtatagtccataagttttgtgcgtagctgtgtaccctgtccctgtgagctggttctgcccggcacctcggtgacctcgaggaaagaagctgaggtaagacctggcctgcctggctcctcgacttccttcctcagccctcaaattctggctcccacctcactctctaaatttatttttattttaaatttcattttagagacagagtcttgctttgtcacccaggctggagggcagtggcaccatcatagctcactgcagactcgaactcctgggctcaagggatcctcctgcctcggcctccaaaaatggtgagattatggacatgagacactgcactgggcctattgtgtatcttgttggcctaaaattgaaacatgccttgtgagcgtttactgcaacttcaatgagtgattattatgttgcctttaatcctgagagactgtattacttgtgcactttttttttttttggatagggggaaattagatttattccctatatgttttagaaaattgaagttttaaatatcagactcactagctgccctgatttaatctgttacaattaagtcagttaaaaaactcctccttggccgggcatggtggctcacacctgtaatcccagcactttggaaggccaaggtgggcaaatcacttgagatcaggagttcgagatcagcctggccaacatgatgaaaccctgtctcccctaaaaatacaaaaattagccaggcgtggtggcgggcgcctgtaatcccagctacttgggaggctgaggcaggagaatcgcttgagcccgggaggcagaggttgtagtgagctgagattgcgctactgcactccagcctgggcaacagagccagaccctgtctaaaacaaaacaaaacaaaacaacaacaaaacccccaggacttcctgtacccacattctagtggggaagacaggaagcaaattaacaaacatctaataactatttttaaaagccagatatacgatatttcacgtggatgacccgattggcctgctgcgggtcagggaaacaggctcccaggtcgcatcctcagcttgttcttggcgctggaaaaaagatgctacgcggttccctccttcagccaccagagggcgcgccctccccgtttgtcctctttcgcgcactttttctcccgcacctgtcagtcacagggcagccctttagcggaacagggatcctgttctgtgattttcctgagggcctgcctctcccagggagtagcgggctcctacgaacagtaatagcaaccataatgtagagaccaagagcagagttactgagttttatgctgatgtccaaagtcacagggcatttcatttttcttcttttttcctttcctttaaaaaaatgggctgggcatggtggctcacgcctataatcccagctctttggaaggccgaggcgggtggatcacccgaggtcaggagttcgagaccagcatggccaacatgatgaaaccctgtctctactaaaagtacaaaaaattagctggctgtggtggtgggcgcccgtaatcccagctactcgggaggctgaggcaggagaatcacttgaacccgggaggtggaggttgcaatgagccgagattgaaccattgcactccagcctgggcaacaagagcaaaactgtgcctcaaaaaaaaaaaaaaaaaaaaaagtgattgggtcgtgagagttctgttttcataaatgaattaatacattcatgaattaatgagttaatagatgaatgggttatcatggtagtaggactggtggctttataagaagaggaagagagactttagctagcatcctcagccccctcgccatgggatgccccatgctgcctcaacaccctgtagagtccccactagccagaaggctgtcaacagaaggaccccacagtttcagcctcagaactgtaagaaacaaattttgtttctttataaattacccagtttcaggtattctgttataagcaacaaaaaatggactaagacaggaatattactgggttaagaaataaaagtaaaaaagaactactattgatacatgcaataatctggataaatctcaagggcattatgctaagtgaaaaaaagtcaatctcaaaagatttcatactgtacaattccaattatataacttttttttttagacggagtcttgctgtgtcacccaggctggagtgcagtggtacaatcttggctcactctcactgcaacctctgcctcccagattcaagcaattctccttgcctcagcctcccaagtagctgggattacaggagtgcactaccacgcctggctaatttttgtatttttagtagagatggggtttcaccatgttggccaacctggtcttgaactcctgacctcaggtgatccacccgccttggcctcccaaagtgctgtgattacacgtatgagccacagcgcccagcctatataacattcttacaatgagaacacaacagagatggagaacagattggtatttgcaaagggacagatacagtgtgtttgtgtatgtgcatgtatatgtgtgtgtgcctgccactatagtggtaacacaaggggattcctttgtgggtctctatcttgattgtggtggtaggtatacaaatatttatatggatcagattgcatagaaacacacatgcacatgcgtgcacacacacacaggaatgcatgtgaaactggtgaatactgaataaggtcctctgtaatctagttaacagtaatgtacccatgtcactttcctggttttgatattatactatggttatgtaagatgttcccactgtgggaatactggatgaatgttacgtgggactgtatgtaccatgcaatttcctgtgagtctgtaagagttcaacacaaaaagtaattacaaaagaagaaaagaaaaggtgctggtgatgacaaggttgttgggaaaagggcttgtgcggtgcctgcataaactggccgtaaaaaatatgggacaataagttgtggaaagccacaggaggcctctgatgaggaaagccttctaattgccatcacgttcccatggccagagcgtgacctgctctcttatttacaagcactgtgctcaaggagaaagacactcctttgaagcattggaatgtggccagatatgccggctcctagttacgcccactccccacagctgctctccagtgagttaaagaataaatcagtagttaagtttatgctgcttcagcacaaagacaatttacctaaaccgccattgctatagattaggtgtatgacacaccgcccccctttcaccatttcacccctgaatatctgcttctcagatctaagtgattgtactcagtagtgtggagaccagagtttggcaccttttgcagcctccaaaagtgcagttggccccctggcaccccaccctttatgcactcttaacctgtctcttctcattccttcgtcgccaccggactttgggtaccctacgggtggtgttgaggctggtccccaacacaaggtgacagcagccatcccactccattagcaactgtggtgataagcactggtttaaaatgggctgaattgaaaactgttactcttgccttagtccagggattggcaaactttttctataagccccaggtagtaaatattttaggctttatggaccacatataatctctgttgcatattcgtttctctctctgtgtgtctgtgtgtctatgtgtgctttaaaatgttttataaatgtaaaaaccattattaactcattggctgtttaaaataggccacatatagtgtgtgtgtgtgtgtgtgtgtgtgtgtgtgtgtgtgtgcacataggtgagatttggtctgtgggttatagtttaccaacccctgctttatacaatatttctaaaggctggacatgttacgtcttctgactctggagttgttgacaatgtcttagccacctgttctgccacttggaagactatagaccagcagactaaagatatctctttataaggctgtgaactctggaaattcaatcacagctgctaatggaaacttctaagtccactagcagctgtgattcattattcatgtagatgctcatagtaatgatggcagcagtggcccgtctggagctgccactgccatcatgtgggctgcagtggggggcaggtggcacagttggggctgtacactccactagacggttggagctggggacaagtgggagccctgccccttccaagttggtggggcaggagctccccgggtgcagctgcagccacccaagtcatggctatggacccaggccttccactccatggagcaggcagaaaccccaccctcccaggtgcagctgcggctgcccaagttgtggcctccctgtgctcttggaggtgctgggagcaggcaggagccccaccttcctgggcacagctgtagctgcccaagtcatggctgcagacctggggctcccactgcatggaggccagagccccacccccccaggcatagctgcagccacccaagccatggctgcagacccaggcatctctgcactcttaggggcctgggaaggcactccctgccctcacaggcttagaagtgcctcctcctgctgcctggcttctccctgctgtcagcacccactgcaatcttagagcaaagttggggccgagcctaggcactgtcacagcctggctgggtgtgcacatacccggggcagtgctgacacaccagccccctgccacagccccctccagactttgggcaccgatgagcataggaggaaagctgagggggtgctgagggcagcttggtactggcctgcaggtgccctttggcataagcagcctgggcaccatggatggcagcaggaggcagacagcctcctgggcagaagggggcaggtcctggtgaggccccaccttgaggtcagggagggcctgaaggctgggggctgggctgccagtcccaggaccagaggatgaacctgtggtgcctttttggggcctattcatggccatctgtggagcaatcagcatgcacttcctcccctctgtggcccataaaagccccaggctcaaccagcacagggcagatgatgggacaaccagctgcagagcggagctatactttctgctgagagctggagcagatgatgggatgaccagctccagggaggagctaccctctctgttgagagctggacacttgttgggatgatctgcatgcagaaaggagctgcctgctgcaggagactgagctggtctattgctcagtaaagctcctcttcatcttgctcacccttcgcttgtctatgtacctcattcttcctggtcacaggacaagaacttgggacccactaaatggcggggctaaaagagctgtaacacaaacagggctgaaacatgccccttgcttaccacgctgcaggcaaagagaaggagacaagagctgtggcccttcagggagcccagacttgggagctccctgagccagggctatgactccctcttggggccctgcagctcctggtgtctccaggcatctggatgctaccacattccccagctccagccagggaagctgaagtgaggcaccgggtccagctgcagcctcgcagagagccggcaccatgctggcaccgggagctgcccgccccgtggcagcaactggcacgtctgactgcgcagtggctggaccccatgcttgctcacacacccctcgcagtcttccttggaggcatgggatcaaggccagtagtataagctgagtgcagcctgccaggccaagtgggcagaacgagcccagagggtccaagcaaaactcgggcaaaggtgccaccagccatgggtttctggccagaaaagcagcactccaaagatcctgtaacagtaaggacccattctctgatgagactgactggaatcaagctactgatcaaatttgcacaaccttcactgctgtcattgccatccggatccatcattgtaacacgctgaccttatggccatgcgaggagagcaaccctagcatctggggagagaatgccacatgctcacgaggcacggggaaggaagaacagtgctgtgttcgccccccagattcagcactgcagcccgaatcaagcaacagctgctgctgggtttgccaccccccacctacatgctatgaaaacagagaaactcgtttttcttttacttttcctttctttttttttttttttttgagatggagtctcactctgtcatccacactggagtgcaatggcgcaatctcggctcactgcaacctccacctcccagatttaagcgattctcctgtctcagccaacagagtagctgggattacaggcgcctgccaccacacccggctaatttttgtatttttagtagagacggggtttcaccatgttggtcaggctggtctggaactcctgaccttgtgatccgcccgcctcagccaaagtgctgggatcacaggtgtgagacactgtgcccggctgaaatatgtttttctgacatggctggtcctgaaccactctgttctgccttataccatcaatagcaccttccaaacgtggatcttcctcatatgtgcacaaacacatagactgatagacatcttgctttaatcggacatagaaatttatggctgggcacagtggctcacacctgtaatcccagcactttgggaagctgatgtgggtggatcacttgagcccgggagctcaagaacagcctgggcaacatggtaaagccatgcatctactttacaaaaaaaaaaaaaaaaatatatatatatatatatttatatatatatatatatggtagtgcatgcctgtagtcccagctacttgggaggctgaggtgggagaattgcttgggcccaggaggtgtgttgagatgagccagcatcgcatcactgcattctagcctgggtgatagagcaagaccctgtctcaaaaaaaaaaaaagctggacatgttgtattttaggttatgagactctggaaataatttaaatcttgttttagttggctctgtttgacaccactatagcaggggaaggaagttggggtgctgtctccactgccaggtcagggtagaagtccgggttcttgacagccttcattgatacctggtggggagagggtgaagagtgccttgatactgatgggttttgaaattcaggttccccttgtcgtccccactgatactgtgactctattcttggcactctctaaccttaacctggtgggataattaggattccttacagcccacaaagagactgaaaaaacaaaggtagaatatccaaggatgctgggacaactataaaaccggtaacaggctgggcatgatggctcatgtctgtaatcccagcattttgggaggctgaggagggtggatcacttgaggtcaggagttcgagacaggccggccaacatggtgaaagcccgtctctactgaaaatacaaaagttagctgagcgtggtggcacctgcctgtagttccagatactcgggaggctgaggcaggagaactgcttaaacctgggaggcagaggttgcagtgagccgagattgcaccactgcactccagcctgggtgacagagcaagactctgtctcaaaaaacaaaaacaaaaacaaacaaaacctgtaacattcacttaatggtaatattgatgacagcagtgggctgtctggtgtgaccgctgccatcacgctggccactgcagggagggtgcaggaaggaggtggacagcacttccacagctgcagtcttgggggctggcaccatgggattgggctgggtcgcctgtagcggggtggggagcagcgcagtgggagagcagtgccttcaggcacatcacaaagcattttcacagatagcttgtttctagtttttatggtgggataaaggggcctgatgcagatctggggccatgatttgggggcccgggctgggaagtgggagtggtgctctcttcagggtcccagccactggcgaagccactgtgccgaccttgctgagggtgctaggttcctggggctcaggagaaggatctgcactgcgccgctggggtctcctccctggtgtccacctgggcattggagtgattgccaaacctgtcactccaaatggcctggcccagggcccgtgatccactctgtcccaggccatccctgagtgccggggtaacgaggcagcttgtggcaatgtcgcccctaccccagatgccagcccaggcccagcgaggatcaggagtcccctccccaggctgtgagggggcacagccagagctacatgctccacagggcagccaggagccctgcccaagttgtggctgcagatctgagcctctgtgctcttggggggccaggagcaggcaggagccctgccttcctgggtgccactgcacctgcccaaagcgtggctgcagacccaggcctcctgctccatggagcaggcgggagcctcctcctgcccctgcagctgcagctgcccaaaccagcaactgcagcctcaggcattcctgcactcttgggagcctgagaagtgcccccctgcctttgcaggcttggaagtgcctgcttccgctgcctggcttctccctgttgttgtcgcctaccataatcttggagcaaagctagggctgagcccagcgggccatgaacagcagcaggaggcaaacagattcctgggtggaaagggccacgtccctggttaggcctcaccttcaggcctgggagggcctcatggctgggggctgggctgctagactcacaggccaggagcggggacttgtgattccttttctgggtgcccgtggtcacccatggaccaattggtatgcacttcctcccttctgaggtccataaaaacgatgggctcagccagaggagggcagaggatggagagatgactgaatgaccagctgagaagaggagccaccctctctgctgagagctgggaagatgacaggatgaacagctgcagataggagctctcctctctagggcctcctctttgctgagggctgaacacttgacaggatgacctgcctacagagaggagctacccactgtgggtctcttctgagctattctatcacttaacaaagctcctctttgtcttgctcaccctccatttgtctgtgtacctttcttcctggatgcaggataagaactcaggcaaaagtgccagcagccacagaggtttccagccagaaagagcaacaccccaaagattccataacaataccagaaggaaaaaaaaaaaaagaaatgaatggaagaaatgtttgaaacaataatgactgagaatttccccaaattcatgtcagacaccaaaccacagatccaggaagctcagagaacaccaagcaagataaatgccaacaaagcaagacctcatctcctgaaaggtgcttactttctgggagacacagatcccctcctggaagaggcccatgaccacacggcaggagttcctttccgagactgccaagcacctgtagcagtgcagaccctgagctctcttcatgcacagcagggccatcagcaggaccagggcaaaggtcttcatggcataggaactgctcattcttcctctcttgccagtcatttagtttcaataaactaaaatttgttcttagttttgtagcttaaaaaaaaactacaaataagccagtgcaatttccacaaccatgttgtcttgtacattttctgatgctataacagaagtggattggataatttaaaaagaacagagatttatttcttatggttctggaggctgggaagtccaaggtccaggggtccacatctggcaagggccttcttgctgtgtcaccccatggcagaatgcaaaagacaagagagcccatgcacacaagaggggaaaggggtctgaactcatcctttattttttatttttatttttttattatactttaagttttagggtacatgtgcttgtgcaggttagttacatatgtatacatgtgccatgctggtgcgctgcacccactaacttgtcatctagcagtaggtatatctcccgatgctatcccgcccccctccccccaccccacaacagtccccagagtgtgatattccccttcctgtgtccatgtgatctcattgttcaattcccacctatgagtgagaatatgcggtgtttggttttttgttcttgcgatagtttactgagaatgatgatttccaatttcatccatgtccctacaaaggacatgaactcatcattttttatggctgcatagtgttccatggtgtatatgtgccacattttcttaatccagtctatcatagatcgacatttgggttggttccaagtctttgctattgtgaataatgccgcaataaacatacgtgtgcaggtgtctttataacagcatgatttatagtcctttgggtatatacccagtaatgggatggctgggtcaaatggtatttccagttctagatccctgaggaatcgccacactgacttccaccatggttgaactagtttacagtcccaccaacagtgtaaaagtgttcctatttctccacatcctctccagcacctgttgtttcctgactttttaatgattgccattctaactggtgtgagatggtatctcattgtggttttgatttgcagttctctgatggccagtgatgatgagcattttttcatgtgttttttggctgcataaatgtcttcttttgagaagtgtctgttcatgtcctttgcccactttttgatggggttgtttgtttttttcttgtaaatttgtttgagttcattgtagattctggatattagccctttgtcagatgagtaggttgcaaaaattttctcccattttgtaggttgcctgttcaactctgatggtagtttcttttgctgtgcagaagctctttagtttaattagatcccatttgtcaattttgtcttttgttgccattgcttttggtgttttagacatgaagtccttgctcatgcctatgtcctgaatggtaatgcctaggttttcttctagggtttttatggttttaggtctaacgtttaagtctttaatccatcttgaattgatttttgtataaggtgtaaggaagggatccagtttcagctttctacatatggctagccagttttcccagcaccatttattaaatagggaatcctttccccattgcttgtttttctcaggtttgtcaaagatcagatagttgtagatatgcggcgttatttctgagggctctgttctgttccattgatctatatctctgttttggtaccagtaccatgctgttttggttactgtagccttatagtatagtttgaagtcaggtagtgtgatgcctccagctttgttcttttggcttaggattgacttggcgatgagggctcttttttggttccatatgaactttaaagtagttttttccaattctgtgaagaaagtcattggtagcttgatggggatggcattgaatctgtaaattaccttgggcagtatggccattttcacgatattgattcttcctacccatgagcatggaatgttcttccatttgtttgtatcctcttttatttccttgagcagtggtttgtagttctccttgaagaggtccttcacatcccttgtaagttggattcctaggtattttattctctgtgaagcaattgtgaatgggagttcactcatgatttggctctctgtttgtctgttgttggtgtataagaatgcttgtgatttttgtacattgattttgtatcctgagactttgctgaagttgcttatttgcactccagcctgggggacagagtgaaactctgtcacaacaacaacaaaatcaatgcagtataattaccaagtattagattctagagtgatctgtgactctgctaccccagaacagtctagatgaggtcagatcttgacacagggctttttgggtggtattcctgcagaaggagagaagtgggagaggggaataagagggagggtggtagcagcagtggcggggaaggaacagagacatggagaaagacagagttgcatggttactgagagatgggaaggtatggaacccagcagagactgcacatctgggtgggacatggacaaccaagctccattccctactcccccctcccacagcctggactggagtcagatccttacctgggcacagatcctggtgataggggaggacttgcaatctggcttcatgcctgggaccttgaacctcacaactgtctggttctgagagcccaaagactccaggcagcagtgctggaagcagggccagaaggtgcagctggagccgcagagccgggtctggttcaagtctaggatgacaccgtcatcacagcactgctccaaggggttgtaggtccactccccgcacctgggcgctggctggcatagccacagtctaagatctggaagagtcggggctggatgggctgcaaggaccagcctaggaccacctccccaccaaccttaatgctgttctctcctccctcactgcatctgttctcacctgtgactccttctgagtttgaacccaaaagttcaaaaatgaagatggcagctgagaagcagaaggagagcgagaatgattctgaggtcactaggtcttgaccacggggcacaggatgatgtctctgagcttctctggttgctgttaacagctcagagtggattttgggactggctgtgggtgcaggtcctggggactgggcttggcaggtgaggaaaggcagggagggctctgggaaaagttaagcttctggaatttgcagttcaggagacagattacaatgcagtcacagatgacatagcagtgattatgaggtgggacaccaataattaaatagggaagagagaattaactttgaagttcagaaataattagggatgtgatatcattagggattagcttagcctagggctggggtctccttaccagaaattctgggcaccatgggttaggcttcagagcagcggacgagggagcagcagtggaaatgggtcagtgactttacataggggcttatataggatatgaacttaccgccatttagggaggtgtgcagaaggagtggtttcttgggaagagttaggcaaaaagagctgcagggaacataaataattcatcaaaagcttaatgagatgcttctggacctgttccaagtggttgctgcctcctcagacccttcagatcctcagggtaaaggctacccaggaacctatctaagctttgactctgctgagtgtctttctttgaacaccgcccaagggaaaaccacttggaagatattccttaactcttgcttatctaagatcaaattactcaccaaacaccggctgtctctaggctccccatattcctccaccctgaagtttcaaggagtccctctactccccgtctcagttcacctgcagacctgcactgtctataatttttcagagtcacgtaggagaatttgtgaagttgcagcataatctagaagaacagcaggggctgcaaaactgtgccagggagaacaacaacaacaaaaataggcggtggtaggatggatctctgggattccagataggaaagcagcaccttttttttttttttggtttgtggagtgccttgtccaagaaaatgctcctgtgtgtctcactgtgtgatgggattacatgtggcgtatttttagagcatgcccctccattttccactggtttcttccctgtgtcacagtgagaagggtgggagggtgaaagaaggataaggcacaggtattagagctttgtaaaagtgcattgttagtatagactctctagagtctcttcctcctccctcctctctctctttttttttttttttttttgagacaccgtatctctctgtctcccaggctggagggcagtggtgctatctttgctcactgtaacctttgccccccaagttgaagccatcctcccacctcagcctcttgagtagctgggactacaggcaggcacctcctggcctggctaatttttttgtatttttcatagagttagggtcctacaatgttctggtcttggaatcctgagctcaagcaatccacctgccccagcctcccaaagtgcattgattttgttgttgttgtgcttatttgcactccagcctggcctctcctttcttgactggatgtccaagtcttcggtattgatttcatgcaataaactagctctcctcgcctatttctgcagttgcgtatttgcatagatatgtctgtttgtctgcttatcaatatgccttctcctttcccacacatccaaacagaaatcccacctgtaaagacacattctctcacctacacagaacagctgctgcggaaacagacctataagaactacattcctgtttatcaagttaagtagtgtgaataccgcattataactccgagccagcaaccaagaaatttatgaccacttgaaagggaaagctgcaatgaagagtacaagtgactaaggagggaaatcccaaagctgattactagaattgatctctgtataattgaactatctatgtagaaaatcccacggaacccactgtcaagcaagaggtgagtctgacagattctgttagtgacaaaaacaagctctttttagattcagacactttattacttacacagacagggaaagaaagagccacaggtgccagcaccatgtcccttatacagggtgacactgaaacaaaagggccagatgactgaacaagaataataggatgcctgttgctgagtagagaatccagcctgtggctccatggtatagggaggtagaaagcctcatccctccctagaagccagaggcagtgagaagctgtgtcatggcggcctcccttatccatagggaagtgagtgacaagtgatgctgtagcagcttcccacaagcctcccatgacctcacgttctgggaagaccagagagtgttctgccatgacatacatcagctacagttaatttcaccaacgtggcccacgtggagatgtttgaggtcgccggggcagtagggcagagccattaccgtaaacctacccccaaagctccgggaactaataagtaaatttagatggttgtagaatacaaagtcaacacacaaaaatcaattgtatttctcgctcctggaataagtggaaacaaaaatttagaggggaacaatgccatttataatgcccccctactgaaattgaatacttaggtatactgtaaatctaggagaacatgtagaggatatatatgcttaaaactataaactagtgattaaagtaatcaaggaaaacctaaatatagagtggtatatcatgtcatagtttagaatatggggctttttagctaagatgtcaattctctccaaattgtctacagatttaacacaattccaatgaaaacccaagcaggatttgtctcagatagaagcaaaataattctagaatttatctggaaaggcagtggaaacaagaatggcccaaacaattttggttgatgaaaaatgttggaggactcacactacccaatttcacaattactccagctacactaatgaagacagtatagtattggcaagtggagagatacatagatcaatggagcagaacagatttcagaaataaacccaaacaaacatggcaaattgacttttgacaaagatgcaaaagcaattcaatgtgggaaaagatagtcatttcaacaaatggtgtgggacaatgggcatgcatatgaaaaaaaaaatcttctaccaaagcttacacttcctacaaaatttaactccaaaatgatctagatataaaaagttaaactatacattttctagaagaaaacataaaaaaaatccttatgacttagggaaaagatacaaaaaacattgtccatttaaaaaatggatagatcaggaagcgggcaagatggctgactagaagcagctgtggtccaccgcactcacagagaggaatgaaaggagtgagtgaattcagcatcttcaactgaaatatacaggttgtcactctcaacccatggagaacgaagaaatgcagggtagggtgatggtccacccaggagcagtgtggaggtatggggactcctgcccccagccaagtgaagcagtgagtgattgtgcaaccctgcctgggaaaccatgcttctcccatggatatttgcaaccttaggatcaagagatccccacataagcccacgcccagagatttgggtccaatacacagagctgtgtggagtcttggcagagcggccacaggggcactcacagagacccaggagttttacgtactctggccctgggatctgcagcaagggaggacatccctccatacatatttctatgaagggggctgaatccagagaaccaagcagtgtcattctgtggaccccacttccacagcacctcacaagttaagacccagtggcttggaattccagccagccaacagcaacaggccggagtctgcctgggtcaggaccaagttcctggggtgggggtgtcgtgggggcagtcaccatctctgtggttcagtagactcagccattctagcctgccagctttggagaatacaaatggtccagatgaggaagggttccccacaacacagcacatctgccttgccagattgtagctagactgcttctttaagtggttccctgaccccattcctcctgactgggtgagacctcctaacaagggtctccagccacctcctacagggacgtttgggtcaacaactggtcagaggaaggagcaggctgccatctttgctgttttgcagccttcactggtgacaccttcaggtacgggaaaaacggaggcaaccagggtcttgaacaaacccccagcacaccacagcagccctgtggaatagtggcctgactgttaaaagaaaaacaaacagaaaacaccaacaacatcagcaaaaaagaccccacagaaacctcattcaaaggtcagcaacttcaaaaatcaaaggtaaacccacacagatgagaaagaatcaatgcaaaaatgctgaaaactcaaaaagccagagtgcttcttctcttccaaatgaccacagtacctctccagcaagggcacagaactgggctgagaccgagatggctgaattaacagaagtagttttaagaaggtgggtaataggccaggcgcagtggctcacacctttaatcccagcactttgggaggccgaggcaggtggatcacgaggtcaggagttagagaccagcctgaccaacatggtgaaaccccctctctactaaaaatacaaaagttagctgggcatggtggcacatgcctataatcccagatgctgaggaggctgaggcaggagaatcgcttgaacccgggaggcagaggttacagtgagctgagatcgcgccactgcactccagcctgggtgacaagagtgaaactctgtctcaaaaaaaaaaaagaaaaagatgggtaataatgaacttcactgagctaaaggaggatgttgtatcccattgcaaataagctaagaatcatgataaattatacaggagctgacagaatagccagtttagagaggaacataactgacccaatggaactggaaaacacaagaacttcacaatgcaatcataagtatcagttacagaatagttcaagcagaggaaagaatttcagagcttaaagaccgtccttctgaaattatacaggcagacaagaatagagaaaaaagaacaaaaagaactgaacaaaacctctgagaaatatgtaaagagacagaatctatgactgattggggtacctgaaagagacagggaaattggaaccaagttggaaaacatactccaggatatcatccaggagaacttccccaaacttgcaagacaggccaacattcaaattcagtaaatacagagaaccccagtgagatactccataagaagatttaccccaagacatataatcagcagattcttcattgtcgaaatgaaagaaaaaatgttaagggcagccagagagaaaggccaggtaacctacaaagaaaagcccatcagactaccagcggacctctcagtggaaatcctacaagccagaagagattgggggccaatattcaacattcttaaaagaatttccaacccaggatttcatatccagccaaactaagcttcataagtggagaaataaggtccttttcagacaagcaaatgctgtgggaattcgtcaccaccaagcctgccttgcaagagctcctgaaggaagcaataaatatggaaagggaaaacctttaccagccactacaaaaacacactgaaatacacagacaagtaacactatgaagcaaccaacaaaacaagtctgtaaaataaccagctagcatcatgatgacaggaacaaattcacacataacaatactaaccttaaatgtaagtgggctaaattcctgaattaaaagacacagaatggcaagttggataaagagccaagacccattgatatactgtcttcgagagacccatctcacatgtgggacacacataggctcaaaataaagggatggaggagaaatttatcaaggaaatggaaaacagaaaaaagcatgggttgcaaccctagtttctgaccaaacagactttaaaccaacaaaaatccagaaagacaaagaagggtgttacataatggtaaagggatcaattggacaagaagagctaagtatcctaaatatatatgcatccaatacaggagaacccagattcataaagcaagttcttacagatctacaagagacttaagactcccacacaacaatagtggaatactttaacacccactgtcaatattagatcatcgagacagaaaattaacaaagatattcaggacctgaactcagctctggatcaagtggacctgatagatatctacagaactctctaccccaaacaacagaatatacattcttctcattgccacatggcactcactctaaaattgatcacaaaatcagaagtaaaacactcctcgcaaaagcaaaagaactgaagtcataacaaacagtctctcagaccacagcacaacaaattagaaatcaagatttaaaaattcactcaaaaccacacaactacatggaaactgaacaatctgctcctgaataactcttgggtaaataatgaaatcaaggcagaaagcaagaaattcttgaaactaatgagaactaagagacaatgtacccgattctctgggacacagctcaagtggtgttaagagggaaatttatagcaataaataacccacatcagaaagctagaaagatctcaagttaacaacctaacatctcaactaaaagaactagagaaccaagagcaaaccaaccccaaagctagcagaaaacaagaaataaccaagataagttattggttaacagaaataagcaataactgaaggagatagaaacacaaaaagcccttcaaaaaattaatgaatccaggagctgtttttttgaaaaaatttataaaatagatagactgctagccagactaatgaagaagaaaagagagaataatcaaataaacataatcagaaatgacaagggagatattaccactgaccccacggaaatataaacaaacatcacagaatactataaacacctttatgcacataaactagaaaatctagaagaaatggatacatccctagacacatacaccctcccaagactaaaccaagaagaaactgaatccctgaatagaccaattatgatttccgaaattggggggtaataaatagcctaccaaccaaaaaaagcccaaagttggaagcattcacagctgaattctaccagaagtacaaagatctggtacaatttctacggaaactattccaaaaaattgaaagtgagggattcctccctaattcatcctatgagcccagcatcatcctgataccaaaacctggcagagatacaacaaaataagaaaacttcaggccaatatccttgatgaacatcaatgcaaaaaacctcagtaaaatactggcaaaccaaatccagcagcacagcaaaaagcttatccaccatgaccacattggcttcatccctgggatgcaaggttggttcaacatacgcaaagcaacaaatgtgattcatcgtataaacagaactaaaaacaaaacacacatgattatctcaatagatgcagaaaaggcttttgataaaatttaaacatccctttatgttaaaaactctcaataaactaagtattgaaggaccgtacctcaaaataatagaagccatatatgacaaactcacagccaatatcatactgaatgggtaaaagcttgaagcattccccttgaaaactggcacaagacaaaaatgccctctctcaccactcctattcaacatagtattggaagttctggccagggcaattaggctagagaaagaaataaagcgtattcaaataggaagagaggaagtcaaattatcttgtttgcagatacataatcctatatctagaaaaacctcatcatctcagcccaaaagcttcttaaggtgataagcaacttcagcagtctcaggataccaaatcaatgagcaaaaattgctagcattcctatacaccaacaacaggcaagcagagagccaaatcacgaatgaactctcattcacaattgctacaaaaagaataaaatacctaagaatacagctaacaaggaaagtgaaggacctcttcaaggagaactacaaatcactgctcaaaaaaaatcagataggacacaaataaatggaaaaacactctatgctcatggatgtgaagaatgaatactgtgaaaatggccatactgctcaaagtaacttatagattcaatgctattcccattaaactactattgacattcttcacataattagaaaaaactattttaaaattcatatggaaccaaaaaagagcccaaatagccaagacaatcctaagcaaaaaagaacaaagccagaggcatcacattacctcacttcaaactatcctacaaggctacagtaaccaaaacagcatggtactggtataagaacagacacataggttgatcaatgcctcctggtctctgatggccatggctgggaatctctctgtacaaaaagatgacagataggaggcaggactaacttgcagctcccacttggagggacagagaagcatgtggagacccacatcatgaaatttttctccaagaacaaccacaggaacataccaggaaagctgagagaatccagagaccctttaaaggaggtggattgctgctgcagattatgtgggacaatcaagaaactgtgagtttgcttgctttctcagctgggaggcttgtagcctggggcaagttctcagtcctgctcactggctgcctggaaataaacttggtgctgttaggggggcatagtgggagtgagactggccttttgggttgtgggctgcatgggagctgggtgaggtctgtgattgctggttttccctcacttccctggtgacctatgtgatgcagcagagatagccataattcccctgggaacataactccattgtcctgggaaccacacccccatcccctatagcagccacagcaagtccccgccaaggagattctgagctcagacatgcctaatgctgcccccacctgattttctctatcggccctgggagcagaagacaaaggacacagtctcttgggagctctatagccctgcccatcacctgagaaacctgaatactcattcaaaggtgaccctagggcaagtttgtatcctccccacacaaccacagctgacgcgctcttaaaagcgccacctcctggctggaggccaaccaacacaaaccagtgcacttaacacacatacagccaaggaccctcacagagtccacttcactcccctgctacctccaccagggtaggtgctggtatccacggttgagagacctaaagacggatcacatcatgggactcttcgcagacactccccagtaccagcctggagtcctgtagctccactgagtggctggatccagaagagaaataacaatcactgcagttcagctctcaggaagccccatccctaggggaaaggggagaggaccacatcaaggaagcacccctctgggacaaaagaatctgaacatcagcccttcagcctcagatcttccctctgacatagtctgcccaaacgagaaaggaacagaaaaataattttggtaaatatgataaaacaaacctctttaacacccccgaaagatcacactagctcaccagcaatggatccaaaccaagatgaaatctctgaattgccagaaaaagaattcagaagatcgattatgaagccaaccaaggaggcaccagagaaaggtgaagtccaacttaaagaaataaaaaaagatacaggatatgaatggaaaaatctccagtgaaatagatatcataaataaaaaacaatcacagcttcttgaaatccaggacaaacttagagaaatgcaaaatgcactggaaagtctcagcgatagaatcaaacaagtagaagaaagaacctcagagcttgaagacaaggctttcaaactaacccaatccaacagagacaaagaaaaaagaattttaaaaaatgaacaaagtctcctagaagtttgggattatattaaacgtcccaacctaagaatagttggtggtccggaggaagaagagaaatctaaaagttttgaaaacatatttgagggaataattgagaaaaacttccctggccttgctagagatttagacgttcaaatacaagaagctcaacggacacctgggaaactcatcacaaaaagatcatcacccaggcacatagtcaccaggttatctaaagaaaagatgaaggaaagaatcttaagtcctgtgaggcaaaagcatcaggtaacctataaaggaaaacctgtcagattaatagcagatttctcagcagaaaccctacaaattagaagggattgaggtcctatctttagtctccttaaacaacgcaattatcagccaagaatttttcattcagtgaagctaagcctcataaatgaaggaaagatacagtctttttcaggcaaacaaatgctgagaaaattcactactaccaagccagcactacaagaactgctaaaaggaggtctaaatcttgaaacaaatcctcaaaatacaccaaaatagaatctccttaaagcacaaatcttacaggacctataaaacaataacacaatgagctgggcacagcggctcacacctgtaatcccagcactttgggaggccaaggcgggtggatcacctgaggtcaggagtttgagaccagcttggccaacatggtgaaaccctgtctctactaaaatacaaaaatcaggtgggcgtggtggcaggtacctgtaaatcccagctactcaggaggctgagacaggagaatcacttgcacccgggaggcagaggttgcagtgagccgagatcgtgccgctgcactccaacctgggtgacggagtgagactttgtctcaaaaaacaaaacaaaacaaaacaaaaccaaaaaataataacacatgatgaacatgtagtattgagatgtgagaatagtacctcacatctcaatactaatgttaaatgtcagtggcctaaatgctccacttaaaagacacagaatggcagaatgcataagagctcaccaaccaagtgcgtggctgtcttcaagtgactcacctgacacacaaggactcacataaacttaaggtaaatgggtggaaaaagatatcccatgcaaatggacaccaaaagggagcaggagtagctattcttatattagacaaaacaaacttcaaagccacagcagttaaaaaagacaaaaagggatattatataatgataaaagaactagtctaacaaaaaaatcacagttctaaatatacatgcacctaacactggagctcccaaatttataaaacaattagtactagatgtaaatactgagatagacagcaacacagtaatagtgcaggacttcaataatccattgatagcactagacaggtcatcaaggcagaaggtcaacaaagaaacaatggacttaagctataccctagaacaaatggacttaacagatatttacacaacattctatgcaacgactgcagggtatacattctattcagcacagggaacgttcagaattagcttagaccataagataggccacaaaacaggtataatagatctcaataaatttaaaaaaatcaaaattatatcaaatactctctcagaccacagtggaataaaattggaaatcaactccaaaaggaaccttcaaaaccatgcaaatacatggaaattaaataacctgctcctgagtgatcattgggacaacaattaaagatagaaattgaaaaattctttgacctgaatgataattgtgacacaacctgtcaaaacctctgggatacaacaaaagcagtgtagcattaaatacctacatcaaaaaagtctgagcctggccaacatggtgaaaccccatctctactaaaaatacaaaaattagctgggtgtggtggcatgtgcctgtaatcccagctactcgggagactgaggcaggagaatcacttgaacccaggagtcggaggttgcagagagccgagattgcgccattgcactccagcctgggcgacaacagtgaaactccgtcaaaaaaaaaaaaaagtatattaatcccagcctaaaaaggcagaaatatcaattgctttgcagacatgaaaactattaacacatacttaaaatgtacattacatgttttattccctagaattctacaggtatttatatgttatctcgttttttttttttttttggaaatgcttgctactctgtatcagcaaacatcccagggctcgaagtagtgggaattgaaaagctttgggagaagtcagaaaagaaaaaaaaaaaaaaaaagcaggaggaaccctcggtggaaagtatgcatagacagtaaacatgccaacggaggcccatctgtttctgtaccctttatgcaacatgtctgtataattggggataggcaagttgtataattggggttggctaataataacaattatttgaagtggggaatattagtcacttacactgcaatatagccagggtatctgtgttacttcacttggttctgatttaaatgatctgttttgttttgttttgtttgagacgttgtctcactgtgtcacccaggctgaagtgcagtggcatgatctcagctcactgcaacctccacctcccaggttcgagtgattctcctgcctcattctcccgagtagctgggattacaggcacccaccaccacgcctggctaacttttgtatttttagtagagccggggttttaccatgttggccagggtggtctggaactcctggcctcgagtgatcccacctacctcagccccacaaagtgctgggattatataccatattttctttattcattcgtctgctgttggacacgtaggttgattccatatcttggttattgtgaatactactgcaataaacatggaggtgcagatgtctcttagatatactgatttccttttttgtgtgtgataaatgcccagtagtaggattgctggatgatatagtggttgtttttatagtttttaaagaacctccatactgttctacatagtggtggtattaatttacattctaatcaacaatgtgtaagagttcccttttctctgcatccttgccagcattattttttatctttttgataatagctaacctaactcaggtgagatgatacctcattatggttttaatttgcatttccctgatgattagtgatgttgagtagttttttcatatatctgttgcccacttttatgtcttcttttgagaaatgtctgttcagatcatttgcccattttaaaatcaccttgtttgtttttgctattgagatgtttgagttttttgtatattctggatattaatgcctagtcagatgaatagttttcaaatattcttccattctataagtcatgttttcactctgttgtttgttgtgcagagctttttattttgatataatcccatttatttatttttgctttcattgcctgtgcttttgaggttttattcataagatattttctcagactaatatcctgaagcattttccctgttttctactataagttttgtagtttcaggttttacatgtaaatctttgaatcattttgagtttatttttgtatagggtgatccatgggagtctagtttcattgttctacatatggatattcagtctccccagcagtatgtattaaagagactgtcctttccccaatgagtgttcctggcacctttgtcaaaatcagttggctatagatacttggattaattttcaggttttctgttctgttccattggtctctgtgtctatttttatgccagtgccatgctattttggttacgacagcttcgtagtatattttgaggtctggtagtgtgatgcttccagctttgttctttttactcaagattgctttggctttttcaggtctcttgtggtgtactttcatatctctactttctcaataatacctcaaaagccattttttttcatatgatgcccacaccaaagaataaacaaagacataaatacctcaaggacctaatacctaaaaaattgagcctctgtaatctcaaagagaaagtaagaacctgagggttccaagggaagatgaatgtgaggaaaacagtgagtagcctagagataaaggaatagaagatctatagtcttcaaagttggaagataaaggaagatggccttctgtcttcaagaacaaaatttgaaatggagggaatcagccctggagctattgctgatgtgtttgccaaatcaatacatccctttatcatccttcagtatgggtatttatagggccacttgaagagagcctatagccaacttggacatctttggtgtcttggtgactaaggagggaaacccagtttctctcaaaagggaaatgaagagaactgctgtatatgtcccctatgaaccatgggagcagtaagtaaaacttggtaaaggtcatcaaattagttctgccaggctctcacctgtgactgtgaaggcacctcatgtaaagtaacatgccttcctgggaatggcatttgataacagcagatttgttctcagtaatatgttttcttttcatttcatttcttttctgttcttttccagatagggtctcactgtgttgcccaggctggcctctaacttcaggagttcaacagtttctcctgcttcagcttcctgggtagccaggacaggtgtgtgccaccaggctaatcttcagtaacgtgttttctttgatctatcattgcatgttttgttagcctcccatggctggattgaatcttgaatacctcccatgatcttatcacacccatcttaactagaatatttccattcaacattgtggccacaaattttccaatcttttgaaatgaggtcaaagctcttcatttgaatttgcttattagtgtttacctatattgaaaaaaaactacatcattaattgcatccttcagttctggtccttataagtggaaagagagctttagagatacttggaaagatcagaatgtagaatcatagatatttacactttgttctcaatattttacagctgaatggtaaaaatttaatttgacagcaaaaagttttgtgagagctcagtttaatttttttttttgacgaagtcttactcattctgttgcccaggctggagtgcagtggcatgatcttggctcactgcaggctccacctgctgggtttaagtgattctcccgcctcagcctcccgagtagctaggattacaggtgcccaccaccgtgcccagctaatttttgtatttttagtagagacagggtttcaccatgttggccaggctgatctcaaactcctgacctcaagtgattggcctgcctcagccttccaaagcgctggcattacaggcgtgagccaccatacccagcccaatttagtttttatataaaggtggcataaatggtaacaccatctttcaaccttgaactttccaaatgcaatcaataggacttgcagaagtaatagggaatattaactaaactaaggctgtgctacaccatgtggtttaactttagattaattgaaattaaataacatgaaaaattcagttcctcagctgcactgttcacatctcatgtgctcaattgccatattgtctagtggttacaacattagacatctcagatacagaacattctgatcattgccgaaagttccattggacagctaattagagtcccttatatgaagttcacctcaggaggctcatactggaattaagaggcatttcaattattctccaattccatcttgtactgcatcaatgtgccccagcaaggatctcctccactcgctccctatgtatccagggatcccctggagttttagtgtctgctgtgacattctggagatgcctcctgatgaattggaaaaatactgacatgggtgaggtctggtggtcaagaattgttggatgcttgccagcccatgaatacacaatggatacacagagagacgaggaggagtcaggaatcaaaggcaatgaaatatttccacttagggctgcaagcccgtccaggcaagtcctccctttgagctggaattctttttacatctacccagccacagaagacagaaatggagcccattacgtcatttctcaacttgctattcctccagcatattccttgcataagactccctgtaggatctcaccgaaggaggacacaaattcctgaaacctttgacctgaccctcttctctccctatacaccccagtcactcacttttgatcatgtgcaccctctttgtcttaggcttcagagtcccaaaggctgttattttcttcctttctggacaataaggtagaaaaatttgaaaatatgtgaagatctccaaggatttgatacaaatgaccaaaagtacatctgaatatgagaactttgacttttctttcaacttatgtagtaataagtacccattaaaaatgttaaagaatcagtctcaacatattaaaaaccttgagacttaaatatagaaaataagaaatacttcttctactattttcttatgtttttttcttgtggggcagggaggtagtggactcttaagcttaggagtctagagagggcaagagaggctcatttttagagtaaaaatattaaccacatttttcctcagggctgaggaaagaatacaccaaaatatagctgtggtttataactggatttgagttggctgtgaaggggaatttgaaactttttgtatccagaaacatcaatggatacgattttagttccccataaatcagccgtgctaacattcatgtataataataattattattttttaaagtgaaagcaagtttattaagaaagtgaaggaataaaagaatggctactccataggcagagcagccctaagggctgctggttgcccatttttatggttatttcttgattataagataaacaaagtatactagtctgctctcatgctgccaataaagacacactcaagactgggtaattgatagaggaaagaggtttaattgactcacagtttcacctggttgaggaggcctcacaatcatggaggaaggcaaggaggagcaaagccacatcttacatagtggcaggcaaagagagagcttgtgcaagggaactctcatttataaaaccatcagaactcttgagatttattcactaccatgagaacagcatgggaaagacccgtccccatgatttaattacctcccactgcatccctcccatgacaggcgggaattatgggagctacaattcaagatgagatttgggtagggacacagccaaaccatatcattctgcccccaacccctcccaaatttcatgttctcacattttaaaaccaatcataccttccccacagtcccccaaattcttaactcatttcagcataaacttaaaagtccatagtccaaagtctcatttaagacaaggtgagttccttccacctaggagcctgtaaaatcaaaagcaacttagttacttcccagatacaatgggggtacaggtatcgggtaaatacacccattccaaatgtgacagactggccaagatggaggggctacaggccccatgcaagttagaaatccagcagggcagccaaatcttaaagctctgaaattatctccatggacaccatttctcacatccaagttatgctgcaagaggtgggttcccatggtcttgggcagctctgcctctgtgtctttgtggctgctttcactcctggtgttgagtgtctatggctcttccaggtgcacagtgtaagctgttggtggatctaccattctggggtctggaggacgctggccctctcctcacagccccactaggcggtgcctcagtggggactctgtgtggggtttcaagcccacatttcccttcttcattgccctagcaaaggttctccatgagggcgctgttcctgaagcaaacttctgactggacatccaggcatttctctacatcctctgaaatctaggcggaggttcccaaacctcaattcttgacctctgtgcacccgcaggctcaacaccatgtggatgctgcctaggcttggagcttgcaccctttcaagccatggccccagctgtaccttggccccttttatccatggctagagcaactgggatgcaggatatcaagtccctaggctacacacagccaaatcatatcacaaggggtggattattcatgaattttccaggaagagtgggcaattcccagaactgggggttcctcccctttttagactatatagggtaattttctgatgttgctatggaatttgtaaactgttttggtgtgggtaggagtgtcttttagcatgctaatgcactgtaattagcatataatgagcagtgaggacaattagaagtcacttttgttgctatcttggttttggccggcttttcttactacaacctgttttatcggcaaggtctttataagctgtatcttgttctgacctcctatctcatccggtgagttagaatgccttaaccatctgggaatgcaacccagcagttctcagccttgttttacccagaccctattcaaggtggagttgttctgattcaaatgtctctgacatttcccccctcccttttacaaggcaactcttaatcctaagggttgtggaaggatgaagatccatattctgtaacttcttcaggctgaataggggcaatgctttcctgcctaactgttagggtctcttgtattcagggtagagaggagctcagaaagcataattatggtgagggtcacttgtaactccgagttctgacaaaaggtggtatctgtcttgtttattctgaactgcaaccagagatcactggttggctcacaggaataagcagtcagtctaaattgcagaagaaaaccctcaaaaacaactgatgagattagaatctaataacaggtgtaccatagttcttgaaacataatttttctctctccagtctcccattttttactaaagacaaatcatggcaaaaccaatttgctttattatacttggcctaattatttgtataaagtgcagcaataataattatttttcacagaggcttttaaaattgactttgatggaactgtgtttcataaaatgaatctcagataagactttttaaaagctgagcccagccgtgagtttgcaccctcaaatacctgagttgggtaaattcctctcctcttgaggtcccaagataacctggggctcctgggccaatcagaaagtgacattctttacttaccacaggtcgggaaccctgtacagggactgtgtagacaaggcatgaggccaggtttcccaaggggcttttattggctttataagtcaagtttgattccttaaaggaaaacataccattccaatcaaagctttggtaaaatcaccagtttctccaattgtgtctgtttgcaaaagaaaacagatccttattgtacttatgcaaataactatattgctataagttaagaatactcacaaatagtttccaaattttggagaaatcaggcagagagaaacaaatatgctccaaattttgttcacaggagttaagctgtcagtagctcaaaagaaaagtttccttgactctgaaaaacaaaacaaaggatccgcaacattttaagcaaaaagccgaaaaagatcacctcagtcctctattagttcagtccatacagataacttctgttctgtttgatattcatgaacatttcagctctccatgagagtcctgaaagttttttcctgtattctaatgtcacaatctccaaagttatcagaaaacctgcatttaagaatatctgctagagtcctatagctgattacaaaccaccttttgaagaggattaaaacaagaaagcaatgatctgtggatgacataaagtcttaggacagccatagtcaaagatacgattgacaaagatatttggttaccttgtggcacacaataatttaacataacaattgtaattattactgataatgtacactaagttatattagaataataagagtttctcatgatttgggaacacataccaatacatatttacacaaatacagcccaaagaaagccaaacatcatttcatatttgacagtgtttcttgtatgatttttgtatcaaataagccaaatgccacctttgcattagtgtactattaatgttaaacctaattcttaataaaattttatagacaaatctatttaaccttaatcagtttgaccataaggtaagattctcgtaaactttttattaacccttaacagattttctttaaaaagcagatcagtgctctaagataaaccttttgtacttttattccaatgttcaattcatggaaaaaactgagtaatacccctttaactttagccaacatgttcatacacagaatttctttcacaagatcaatttttcacaaacctttcataacttgcttaaaccttcagctttattctatcttaaaacttaaaacaatccttcaaccctttaatctaggcaaaaacaatccacattcccatgccttcttataatcttttaccaaaaacacatttcacttttttacacaccttgcatgtaaaactttttttcctgaagattacataagtcacatgaactaaaaggcattatagtttttgtttttctgagaaaatatttgatataagctcttattatttttaaaccaattaattaaagctcttttatataaacattacacacaacacatgtaaatacacagacagacagaagaagatccagtagttgtaagattgttcatttgccagtttgttaattggattactggcagggtggagcctttggaggaacagggccaggaaagcatgcagtttctacagcctaacaagcaggcacagctggaaggcaaaaacagatccccaaaaattaagggcctcatttttacaccaggtcctggatccccaaaagaaatgctatagaacaagacagtacaataattttaccatgcatttaattgctaggcaacccaaagtcaatcagcccattctgtgattaacccatcccccataggagtcttatgtctgggtggggggaaagggcatttccatactttttaggtggtcaagagcatgcttttctgttccaagaaaaagcaaagcgccatatattcccaaaccactgccattagttatttaccaaagtatatttcctatctagttattacacaccagagttctctcataatgcaaagtaatttctgatattcccccaaatcaaaaccatcacataacacaatgcgaaacagaacagagtcttcgattttgagaggaatctatccacttttaattcctagggtttcatgaggaaaacaggtttttcccaaaacgtggtctgtagcacttcctgtttttcccaaggagttccatgatgctagagcttgaaaaagctgacttttaaccatagtgctcttaaaaaatcctttaaaatttcttattacccaactttagccaggccaaactgccaatatttctggcttttgaactttaccaaaggaaaaccttccaaatgctccgagaaaggaaaattcaagatggttggtggaggggaaaagaatcaacaaatgatgaaggtcacacagatataaaccagaaagcactgattccctaagccaggattgaacccaggacaccattggagaatggcacagccttacctactgagctacagcactgagcagtttctgctgcttttcccagaaggagcctagagcagccaattttgagcttgcacaggcttttaagtgctcaagatagtttttagagttaactgtgatatgaacccctaaattcatgttccctggaaggtagagccaggagaaagtactgccacatcgttacaaggttaagctcccaaggacatctttcaacatgtggtctctgggcaagatgaaggagcagacagttgtcctgagtaacagaaaagagagaaaagagaaaggagagaaagggagaaaagcattgcctgtggcagggtagggaaggcaaagaactcagggaggccagagaaagactcacccattgcagccacactgaatcaaaagtttaggccgccccttcttggttgcgaaggaatcttttccagcagtcccatcagctctcaagtttccccctttggggagaagaaaagttccccatgtcctattgtcccatgatcctgtacatgcctaatcctgtcacccacagccatcagcaaagagtgcaaggcagattaatccaaagagaatagcacttaacatcctgtagtgccaaacctgttcttagcacatagagagggactttactgagaggggcctccatcctcttaagtcttaggaaggattctaatctgcctaagatgggccttgaacccaagttcggtcaagcgtccttgcctttaattaagaacgacctttactcatgtatgattatttttattgtggtagaaagagcttggagctagtagttcagcaaagtgaatataaaccctgaattggcacggagtgatggggcacttactctattatttaaattcattgcaatcattacagatgccctccagagctatcaccaaagcctcccttttctctattcaaaagaacatttagaacacacacgcatgcacacacacacacacacacacacacacacacatacacgatccctctgtcctcttttatgtcatcactaactcagttcaaagagcacttcctcagaagcattcactcactcactccccagattttgtcaaggttcccttttatcaactcccatttgaaatctttactttccctacatgcactttaaaagagatggtatttcaataattatcctttcaatgtccatttcatgtcctgcactacaatagaaatgtcttgccatacactctgcatctagcacagagccctgcgcagaggagatgctccatatttattgacttcaacatcaatagccaaattgaggcactgagtggaagtaaaccaaattcaattaaataagatgggtcaggaaagacccatacttgggaataaatctaataaaagtgtacaagatcttaacactgacagttacaaaacattgctgcaataaattcaagaattttgaaataaacagagctattccatgctcatggattggatttcttaatatctttaataagtgattctccttaaatgaggtatagatttggtgcaatcaaaatcaaagtctgtaggcaggcatagtggcacgtgcctgtaatcccagctacttgggaggctgagacaggagaatcgcttgaacccgggaggcggaagttgcagtgagccaagatagcaccactgtactccagcctgggtgacagaacgagactccacctgaaaaaaaaaaaaaaattccaacagcttttttcttcctggaagtttacatgctgattcttgttacaggacctagaaaagccaaaatatttattcttaattttaatatttgtgggtacatagtaggtgtatatatttatggggtacatgagatgttttaatacaagcatgcaatgcataataatcatgtaagtggggtttccatctcctcaagcatttatcctttgtgttacaaataatccaattacactcttggttatttaaaaatgtagaattaaattattattgactatagtcactctgctatgctatcaaatactagatcttattcatttattatatttttgtacccattaaccatccctcctaccctcaatacactttcccattaaccacgccccctacccataccctttccagcctccagtaaccatccttctaatctctatctccatgagttcaattgttttgatttttagatcccacaaataagtgagaacaggtgatgtttgtctttctgtgtctggcttatttcacttggtatgaccgccagttctatccatgttgttgcaaatggcaggatctcattcctttttatgactaaatagtactccattttgtgtaagtaccccatagatacttaggttgtttccaaattttggctattatgaacagtgctacaacaaatatggaagtgcaggtatctcttcaatatattaacttcctttcttttgggtatatatccagcagtaggatcatatggtagctctatttttagttttttgaggaatcttcaaaccgttttccacagaggttgcattaatttacattcctaccaacagtgtatgagggttcccttttctccacatccctgccagcacttgttattgcctgtcttaaggatataaaccattttaactggggtgagatgatatctcattgcagttttgattagcatttctctgaagatcaatgatattgaacaccttttcatatgcctgtttgccatttgtatgtcttcttttgatatatgtctattcagatctttcaccgattcttttgatcagattattatatttttttcctatagagttgtttgagctccttaggtattgtggttactaatttttcttttcttttctttttttactaatttttcatcatatgggtttgcaaatatttttcttattctgtgtgttgtctcttcacttcattgattgtttcctttgctgtgcagaagcttttcttttcttttcttttcttttcttttttgagagggagtctcgctctgtcgcccaggctggagtgcagcggcgtgatctcactcactgcaacctctgcgtcctgtgttcaagtgattctcccaagtagctggaaatacaggtgcatggcaccatgcccagctaatttttgtatttttagtagagacggggtttcaacgtgttggccaggctggtctcaatctcttgaccttgtgatctgcctgccttggcctcccaaagtgctaggattacaggcctgagccaccgcgcctggctggcatttatttattgggtgctgctacagatccctctgcagatattaagcaaatgtgctgaaagcctttccaagaaagaatgagtcagattccaatccgggccttagccccaggatattgtccacagaaatgtggagcacaatgattacgcctctttctcacttaggggattttctgtagaatctgtttctctccagttcttgccctatattgatatatttctcagggctgctctctagagggtaaaatgtgatgtgtcagaagatccatggaagcagccaggaaccagttgctaggagtttggaaaaaaatcctgggagcaggcagagggtatgtgggtttgaatgtcaaaacggccatgaagcaaagtaagtgagaaccaaagaatcccatcaaagtagcccctgagagacccttaaggctgaaagtggaacttagctcagcatggccctctcagccaggtgattttttctcttgatttctggtgaagcgtgagcttgtaaagccacagggagccagcacctaccatcttcttgaaagcctgatgccaaagatctttaaacatcttgacaccatatatcaaggaatccagctgccagataaaatacaagacttctagttaagtttgaatttcagatgagcaacaaagaaatatttagtgtaagtatgtcccaagtgttacccaaaacatactaaaatgtttaaattatctgaatgtcaaatttaagtgggcattcttatgtttttatttgctaaactggcaaccataactaggaacacccaactcccagcatccatgaaagctctctctactttcctgcagactcaaagccaaagaagtaccaatacttcttcagggaccagtgtattaagccacttttgcattgctataaggaaatacccaaggctaggtaatttacagagaaaagacgcttatttggctcatgcttcttcaggctatataggaagcatggtgctggcatctggttggcttctggtgaggcctcagtgacctgttactcatggcagaatgtgaagcaggagcaagcatgtcacatggctagagtgggaatgagactgagaggaagtgtcacacatttttaaatgaccagatcttgcaagaacccactattgtgaggacagcaccaagctatgagggatcttccccatgacccaaacacctcctgccaggccccacctccaatactggtgattatatttcaacatgagatttggagaggacattcaacctatatcaaccatttaaatttaaagttgaggaatgaaaacatttaagagcaagtaagcatgaattatgttcacccaatcgtactcctaaaaccatctcagctcctctccttcagccaagggcatgtcctcatgtccaatctggttctcactggagagatttgggagtgggaactctgcaatcttgctgtggtcaataaaagaacctcccagaggctcacaggggcttcaagcttcaatcgtagtccccatttcagatcctctgacactctcccatccactctccttgtgcctgcttcaaagccacagcaaacagaagccaaacctttagtaaggatgatcccaatctcaattccaaccccagccccagcatatccacctttgcctatacctaacactactatctggacatccgctttcagcccaggccctcgctgttttcctcattgcctctgtggcacctcagtcccagtttgccctccacccatccaggaagctcactcccttccctggattctcatcttggctcttttatgagcttccttgcatgccttcaccttcctgggttccagagagcccaagaccagctcccaggaatagtgcccctaccccgatgagcctgatcccagaagaattagccccaaagtaatgctgagctttagccagaacaaaagctagcctagaaaattccccaggcaggaaacagatgactgcacataagtctcattgccgaccccattcgtttcccacaggggcttgtctgcatcctcatccacgtgtgctcaggctcagagtgagtttcaggtgaggaaagagtgatgaacaagcagaatggaggaggaatttgtggggttgcaggatggggctctgacagggccccaggttggcagccaggtttgtttctctctgggacccacatctgatctatccctcaggaaagagtcagtcagccagcccccaggtgtggaaaccagatctgtgacatcatggagaactgctccatggataagcccatgagtaagccctagtgccatttacccaggtgtggattcacctgctcctatgctccacttccagcaatgatgacaaacattctttggtcccttggatcaaaagactttgagtcaaaaggtttcaggtgtgaactctgactgcaccttcccccataatcaaagaaggatccaggtaggaatccctgccatgctccaggctgaagcggggagagagcagcagaaaaggaatttcaataactgggtcctcccaagaggggaccctgctctgttctccatctctccaccttttgtcacagatgctcttcaaccaattccgccaccatgtgtcaccatgtgtctctgaacacaaatcttaaacaatctctttatctctccagatgaagaaagacccaccagggcagacagagctgatgtttccttgcagtggcttagacagtaatctgaggtcctgggatacagggtacattaagatattaaagacctcgagctctgagtgtcgaatctcatcatgatggaatccaacataaaacaagactgaatgcaaacatgatgcttaattgtgtgcggaattgaaaaaaatagttctcaatttttttgcttgcaaattgtgggatacgtttaccagatttgaacttttcccttatttgtcatcccgctttgttgattctgtaaccaggggcttgggattcattttggggatcccaaagcccttgtttgttgaagggtttcaaagtctggtaggagggtggtgcacacacagatagaattgttcatctgtgggcggcctctgactccctccctgggtaggcctccaggcccaatccttccttctgaggaaccgccgggaaagactttgatcaaaacaattaaatgcattgggagctcagtctgaggcaattatgtggtttcatagaggaagaggtagagatgactcaggcatttctggccccatgtcagcctcagggcaatcacattcgggattttgcaaaagacacattcactctgagcactggagacctacatctctttgtccagttgacttaagttctcaccaagtgaatatcttcatgctaaagacagtttcatttgtgattagggacaggagagcatgtttcccctcggtcctctgattctgactggaggggcagtgctgagttctggatcggggctgctggcagtacgtgggaaagctgtcctatcagtactgtatagaacaggtggtcagagaaaatgcctccctggaaaaccttttcacatggttgaatgtccccagacatgagagggagtggaggactttgttctagagcccacctcagaggccaggcactgccaatgccatgagcaaaatcttccacctctttcccccaattttctctccatctggattctgtgttgctgaggtcatttgctctgtctcttcctaccctctgtattcttctctctcatctgactgacttttctcactcaattttcaaatatcacctaaaataataatacagataagaaacaaatgtattctaatgaaaatgttcagtctgagaagtaaagattacatggtgagcattgataatttttatcatgcttcctaccctccccaaaggtaactgcatttaagatgtagtgtttgtatttttccataaattctgtatagttgaatacatataagtctacatatatgccacacttttcccttcttataaataagatatcatacatcccccccttgaagccctaaaagcccacagatcacagataattctcatggctgcctagatttctattttatggataaattgtaatttatttcatttgtcttctttttgaaaattatgtaggttgtttgcaatatttcagccttaccctaaaaattctgcaacaaatattcttgtatgtacatatttgggcactttaattagagtgtttagtcaacagcaatagatgtgaaaattctgaagcaaattgtgtaagatgctctgagccatatgcatagggaaaaatctaaacaatagattagactaaagcaataaacatgaatgaacaggttcagggtttcagttttaagaattgaaacatattttgaatggcagccagtaaaatgcactgactccaaacacttcaaacaagacattcctgttatcaggaaggttaggagggtaacgcttgttttgttcactaagctgggtggactcatgattactgaagcaatactcatttctgctttagtctcctatgtttgcatcccatgaagctcaaatacgaattgaagcaaatctctaagatttttttttttttgccttatctcctaaaacttgaggaatgcatgtgttcttagtgattcacatccacgggacaaaaactcaaggagaaataagagctgacgtcatgcaagtcttggctgcttttgttactatacattttctctgagagtccaacagacttcgggctggaacttggcactggagactcatgttcggaatcataggggaacatctggctgttaatcacttgcacaatttagaacatttcctttacattggctttaaattctagcccttatttcattttgtagtcttattttctttcttctgcatgctcacaataccaagcattaaatgtattttaataactaaaaaaaaaaaggaattttatttctggtggtgttactaatggttgtgtgattgtgcagagtccagaaagctgctgacttaactacccatcacccagctcaaaacgcccaatcccctcttaggtgaaaagtgatgaccatacagatatttaaaggagaagcaccctcacttacaacatcagagggtcaaatctacaggctcatcagctgtcctacattttgtcaaaataaagctcctctcaaacatggaggcacatcggcagttcatggagccagaagtacctacttcaccctctctcttacatgggtgggcctgaagtactccttatcagggcatctggactctattttgggtgtgtgcaaagtgttttgaagggtttttcttggtcgatgttttgtatttgggggaaaaattaatcatcctcaaattgaatcgcctaatcaccaggtgaccccaggtgatggcatggcaccatactctccagaggtctgcgatatttgcccagtggagtacagctcccaacaagcctgcggtcctccattcatgatgctctctagaatcccaagatggcgtttgtttgcctgcatgggattcaccttccatgactctcaggaatcaggaactcaaaagacatgatcctgtttttttttttttctttttttctctgcctatgtgtatcagctcagccaacctcctcaatgtgctttccctcacgccagcggcacaccagcaagtcagcaaagttcaggggctcagtatgcactgaatgaggacacaagtcttatttgcctctcccttgactatgttgggggtaaggagaagacacagcctctctgcaagcacaatactcttccctgaaaggccaccctctttctggtttccagtactcctcttatatcactagtatcactagttggttctgcttctctcccatccagggatctggagaagtttcatatcaaataaacataaacacacgaataaatgggtgtggtcctggaaccaaataaataatcttcattgaagtggggatggggaggtgtaagacaaagacagtagtgacttgcattagacaggaggtagtgtgaaaccacgactcctgaaactgtaagcctggtctgctgatcatggacaccagcagaatgaattcataagttcaagtggtggaataatatttttacagaggtaaaagaaaataacagccaacaaagacctttctaaaatagccttcaaaaatggtaaggaggttgggcacggtggctcacgcccgtaatcccaacactttgagaggccaagacaggtggatcacatgagtccaggagtttgagaccagcaactcctgggcaacatggtgaaactccatctctacaaaataaaaaattagccaggcatggtggcacatgcctgtagtcccagctactcgggagtctgaggtgggaggatggcttgaacttggaaggcagaggttgcagtgagctgagatgacaccactgcattctagcctgggctacagagtgagaccctgtctcaaaacagaaaaaaatgaagctgaggattctccaacttacagccattaagggcagtgacttcaacgagactacttttcctgctattgacaacagtaaaactggatgaaccaaatgaggccactgttttcaggtggtgaacgaagacaggataaaatatcaatctctgaaagtaaagtcacagagtgaacacctggatatttggactctgcctggggacagtttcccaacggaagtgcaagtagcaaggatctgagtatagcacagcagttccgcagaactaaggttctggatggcttgatggaactggaatcccttaggtgtggcatcagtgaagaagtgcgagccccccaaatccacgtggggtccaccaaagttcctggatgaagactggtctgcacatgcacattctagaccacccaaagcttagcagagaggtaagtcttaagaagtatttgtctcatttatacccatgggattttaatcaatggaggtaatgacagggagatgccaatgccattgaaatatgtttaatgtcactcacagtttcggtagaaattagaggcacagaatgtgaagcaggggcatgtggggaagccccaggtgtgatcaggagacagaggcaggagtgagcaaaaacctaggccagagcccttatgatgtgttctgtgggaaaggcagaacagggcaggagatgcagctcacaactggtcagtttgaataatattggcagggtgtgaaatatagtggcagcctctagttgtctggtacctggccctgggttgacttagggcagagaaaatgttggcttggtgtgtaagagagataaaggagatggttcagagcgggggctctggatctcgggggagatgcagatacctttggccatgagttaaaccccgtagttaatggataccaaatagagaaatacagactcaagaaaacacaaagcactatcccagttgggagagcacaaaggagacattatcaaaagtaatgtgggattctggattggatcctggagcaggaagtggacaggaggggactaccaacaaaactaaaataaagcctgtagattcaacattcatttcctactttcaataattgtattaggatcatttaagatgttaacattagacgaagttgggtgaaagatcaaaactctgtactggctttacaacattcttgtaaatctaaaattatttcaaaatggcaggttaaaaagtattttaaatgatacctacaaaatactatcatgatagtgatagtgaacactcactaaagatatgatcaggatgccctaataggcctccttattcttgtaattgcaattagagttccttctttccttaatattatgtaactggagctcccttgagctatttctagcctggggtataatgtctgactcatacacatgtagtttcataggaagccttggggccctagcagaataacactatcacccacaagataaccagccaggtgctgcaccaggtctaggccctctgtgtgatggatgcggtcccgtaaccaaagggagacaaagttaccacaccctatgtggcccagaaaaatggccagagactgaactggcacagtctctgctaacacaagagtaacagcactcttccacccagtccatgctgcctggaacttccctgacagagaatcattctgggatcattctcgagaacttggcaaatatctcaacactctgacatcacattctcttctacagtcaggatcctcaatcctggattatagactcacaatctcaacttcttttctggacactggaagtctttaaagatagaatggtcagaatgactgaaagtatttttttgtaatgagaagccaaattattgtaacacataaaatgattttgctgaaaaacttgattgatggcacataattacaaggcatattctttcctttcttagtagcttaaaaaatcaacatttctttccttctctaatacattacttgggaatgtctcagtggggaaggctcatttctccttcgcacagtgttagctacgatggcctgactgagcctggaggatttgcttccagaatggctcatttatgtgcttgagaaactggtgctgggtgtcatttgggagctcagttcagggaattggctaggggggtcttagttcctcttcatattagtgcctccacagggctacttgggcttcctcccaagaaatctgtattagtcagggttgtctagagggacagaacgagcaggagatatatatatacatatatatatatacacacacacatatatatatcttattattgtgggaccttgtgatcgtgtgagttaacactacttaataaactcccatatatgtatatgtatacttattataattaatgtatgtatatctacatatgtatatatgtgtatgtatatatacacatatgggagtttattaaatagtattaactcacaggatcacaaggtcccacaataggctgtttgcaagctgaggagcaaggaagccagtccgagtcccaaagctgaagaacttggagtctgatatttgagaacttggagtccgatgtttgagggcaggaagcatccagcatgagggaaagatgtaggctgggaggctgagacagtctagtcttttcacatttttctgtctgctttctattctagccaagctggcagctgattagatggtgcccacccagattaacatcgggtctgcctttcccaacccactgacccaaatgttaatcttctttggcaataccttcacaggcacacctagcatcaatactttgcatccttcaatccaatcgagttgacagtcagtattaaccattacagaagccaagctccgcatgcaagtattccaagaagctgatgaaaatcatgtccctgacatggaaatcaagacactttcaccacattctactggtcaaggaagtcacaaggtaagcccagattgaagaggaagggattcaattccacctttcaatgggaagaacagaaagaatttgtggctatcttaaacctaccacttagagttttcaatagtttaaagaataatttatttttagaacagcattagatttacagaaaaattaagaagctagtataaaaagcttccaaataccttgaaaccagcttcccctatttttagcttcttacattagtattttattataattaatgaaaggatatttataccccgttagtaactaaagtccatagtttatctaggttttcttcattttcaccagatgttctctttctgttccagaatcctattcaggacacattgcatttagttgtcctgtctctttagcctcctcttgactgtgacagtttctcagatttttccttgtttttgatgaccttcacagttatgagcagtactggtaaggaacttgcttattttctggcacaagatgcttcagatccttaccagggtctgaagggcactggtaaggttgtagaatatccctactggaatttgtgtgatttttccctctaatgattagactgacattattggttttggggagcaagataacagaggtaaagtaccatttctatcacatcctatcaaggagatactgtcaacatgatttatcattgatgattatgacaccgattacctggctgatgtggtatttttctccagcgtaaagttactctttttctcccctttccacattgaactctttggagccaggtcattatttgcagcctgcattttaaaaagtgaggagttgggctttccttccttgatggtgctgtatttatatatattacttcgaattcttctgtattagagatttgtctcttctccccacttatttattcaatcatttatttataccagtaggaactcatgagtatttattttaaactttgggtttatcttagtccattcctgctgctataacaaaataccttagactgggtaatttataaacaacaaaaatttatctctcacagtttccggaagtttgaaagtccaaactttcaaacacctgcagagtcagtgtttggtgagggctgctctctgcttcaaagatgacatctttcactgtatcttcacatggcagaaaggggaaacaagaacagacttcctccagcacttttatatgggcactaatcccactcatgagggaggagccttcgtgacctaatcatctcctataaacctacctcttaacactgttgcattgaggattaagtttcaacgtgaatcttggagggacacaaaaattcagaccacagtagggtcataacccaataccaccgaattcatttcttgctcaaattgttccagctttggccactgggagctcttctgttggcccttgtgcccctttgacatattgtgatcaatgtggggttatatcattattgtaattgttattttcagcacttccttattttctggcacaagatgttccagattcatcgtgtatattttctgttccagatctagaatgtgccatttctccaaggactgtgcagtccttttttacacttctttccttttaaatttattccgtggttctagttcttccttgatcctaaaagtttaggtcaaattgtatacattttcccggttagttttatttagtaaatataaatatattatttagttttattataaatacattatttataataaatataaatacattatttataataaatataaataataaatatcctggtgttgtcaacttaaaatgcccagaaatatgtaaaagtgaaaacaaaactcttgatttaaagatacgtttcactctatctttcctggctgcccggcacttctacctatgcgtcttccctgttcactgacctagcttctgttcttttggtgctggaagcacaaagagggtgtgagattcctaacgttattgtgattatccatgggcttttcaaatatgtaaagcggattacctcaaaggccccctttggcttctttagagacacaaatgctgaggatctctcacctgagcatccctcgatgagggctgttgcgtcttgatttcatctgggtagttacaggcatcatccaccacgaagtttccaacccagagtcaggatgcagctgagcttgacgggcgtggtgcagacgtcggtgcagcgaaagctgaggagccgtgggcgttcacccgggtgccggtgtttctaaatcgcgggctgcgacctgcatactcaggtgccagctgggagcagaggcggatttgcgaggccaaaacctgggtgtgacttggaatctcagtcgcgctatgggggtgcacgctggctcaaatccccgtggaagatgcacctgtgacctgcccaggctgcaaaaccaggtgcgctgccatgggcacgactcactgggctccattttcaccacagggaacttggaccgcctgacattgaaaaagactgaggtagctcgggggcagccaaaagaaaccagaggcggggatcctagtatcattcaggaagtggacccagccgcaaactcaggagcgttccaagtgtccagagcgtctggtagtcgcaatagccagtgatcagtgacacccccaagaaagtgatagcgacagaaacatggcgactacttacactgccgcccccgtgcgcccctgcgcgagctctgctggaggcgcccgcgggagcgcctgcgggagcgctccactgcggaatccgccgctctcttctctgagcagtctcctactgccatctagggaggaatacggggataccggctggagtaccctctctatcttcttgcctgcaggggtcgcaggatagatgtttcgagagcctataaaagtcatacagtgctatggtgggtgcacgctaaacgtgcctttgacactgtgattaaatcacataacccatataaaaagtaattggaaaagacaacccccagaatggagagaatgtttaaaaatcgtatttctgataagagattaatatccagaatatataaataactcctgaactcaacaacgggaacaaataactcatttaagagacaagagaaggatttgaatagacatttctctaaataaaatacataaatggccaataattacatgaaaagatgcgcaacatcattgatcattagggaaatgcaaatcaaaataacatggagatagtacttcactccaactagcatggctattaacaaaaaaacagaaattaacaggtgtgggtaaagatgcggagaaattaacaggtgttgtgcattgctggtggtaatgtaaaatggttcagctgctgtggaaaacaatgggagtttctcaaaaaggtaaatatagaattaattaatatacgacccagcaatcccaatagtaggtatgtactccacacaattgaaatagggacgcaaaaagatatttgacatcaatgttcatatcagcattatttatagtagccgaaagatggaaataacccaagggtccatcgacagatgaatggataaacaaaatgaggtattttgatacaatggagctggctactaaccacctgctcctgtattacctaaaggccttcactccctaacccattggtcttttttgtccattattttttgtaggggttataacagcattcaagtgtggagtcaaggctcactttaaaatgcatcaaacatagctatgtatcaattcaccacagtccgtcaaaaggcctgtgacgcactctctctgggggtatttgagccgatatcccagtagtcaacactagatggcagtaggagactgctcagaaaatggagagcggcgcccaccttgcagtgcgcaggcgtcgtcagtagacatcgcgcaggcgtcgtcagtagacatcgcgcaggcgtcgtcagtagacatcgcgcaggcgtcgtcagtagacatcgcgcaggcgtcgtcagtagacatcgcgcaggcgtcgtcagtagacatcgcgcaggcgtcgtcagtagacatcgcgcaggcgtcgtcagtagacatcgcgcaggcgtcgtcagtagacatcgcgcaggcgtcgtcagtagacatcgcgcaggcgtcgtcagtagacatcgcgcaggcgtcgtcagtagacatcgcgcaggcgtcgtcagtagacatcgcgcaggcgtcgtcagtagacatcgcgcaggcgatgggtgaggcggctttggccgccatgttttcgtcgcagtaactgccttggtgtcagtagtcattgccagtttcgggcgttctggacaattgggatgctgcagagttcatggctggggctgctcgttgggtgggacaagaatcctctgcaatggtttgttttggctgcccaggaggtgcgtcaagtcgctgccgctcccctcgtgggcgtcaggcctcaagagttccccgcctagaaaatggagctcagcgagtcgtgcgtaccatggtgcacctggttttgcagcctaagcgggtcactttagtgcatcctcctcgcggattggagcctgtttgcacccctatagcccgaatgagacccaagtcacacgggctcagaagttctttgcccctggccatgatcccccagccagccacccgagtttccaggcctcaggcgctttggaaacgcctgtacgtcgcctgtacctgaatggcaggtactcatctgctttagctacatcatagtctgcaccacttctgccagctcgattgcagcctggatttgagtcagaaacttttcatggtggatgagggttgtaaatatccaaagcgactccagatgaaattgccctcatcaaaggaagctcagatgacagatttctgcatagaagccaaaaaagccttccctcaaggaaagagtcagtttcaagtatttgcaaactcagaacagtgtcaattttagatcactacaatgctgcccatcaaggaagaaccctattgctccctggcgtctctccttgagccctaaacacagtagattcagaaactaagtcagcaaatggaggaagattcttaaccgtgataagttggaaaacgtgcgtcagagggccacatcccttcctcgagttcaggctaccacctgactgcaggtcagagctggaagagacagtgaaaatgtaagtttaaataaagattgtcgttttcacttttacatacttaaagccattttaaatgagtcacgggcagatatttattaaataaaatgaccaaaaaattaatgggatttgacctaacttttatcctggggcaggggaagaactagcactgcagaatacatttaagctgcgagccgtggctcctgcctgtaattccagcactttgggaggccaagatgggagaatcacttgaggccaggagtttgagaccattctcatcaacatagcgagtcaacttagggagatcccatctctatttattttttaaaataaaaaaaagaataaatttaaaaggaaagaggtgtgaaaacgacagctacttagtaattaaattctgtgagtcatggcttgttcatgggaatgattctatttgaatgttataataattttgtttctaatttcagaaagtattttggtccttctgaccaagtctttgtatctgtgtaaatcatgagttaaagaaataactttccaaaaagaggttgagatcttctgattcaggacttaagcattgtgagtgtcaagggggtgtggtgtcagtgttgagatgtgtggccctgtccctgttggtggtcttggtttcagacttctgtcaggaaagagtcagacagtgttgactaggaaaaggagttctgtggtgtctgtggtttggtctgtggtaattttgctgagccagaaagggaattccagccttgatgtccagggctgactctccgggcaggctgcccattggtgagtgggagcagtgcctgctgtgctttcaggactgtgtccatcacttcctgtccaggtggacactgtagcgcaggcttcccattgatggacgggaacctgatctccctgtgcttttactgccatgctcatcacgcactggggatcatcagcccaccttttaaacccagcccacaattggccagttatcttgtgggtgatagtgcaactgtctgtgtcgccaggcttcccacacaactatctgcatctggtttggactggctaaaccaggccacaccaaaggtcaggggagccttagatacataacgcttatttcaggtgtgagggagcatgtgaaggcaccctgattgcatctttaggaagtgttcattatcgtgattgcgtttttatatgtaacatttaaaatattgtctaacttattactttaaaataattttagacttacaaagaagttgcaaaaacagtatggtgaatttgtctttttcactcagcttcctctaatgttgcatagccttaataaaattattgaaaccagaaaactaatactgacataatactattaactgatctgcagaccttatttgagtttcatcagttgtcccactcgtgtccgctttctggtctaggatgcaatccagaattcagtgttgcaattcgttattgtgtttccttactctcctctattctaggatagttcttccttaagccttacctgtctgataagccttgtcttatcagacagatagtcttgtctgtgtatatgcagcctagccctcagccaggaatttggggaagactccacaaggacatgtggtgcttacctctgcacagttcttctttgataccatacctcagagactccaggctcaccagctgccctgaatgccctcagtgctgcagaactgctgtcctgtgctcagatcccagctatctgcattgcacttgggaaattgttctttgacaacttgtttatctaagggctcaccctgtaaatgtccatcccttgtggaattgcagtcttgtgctacctgttgtctggtacctaaacacagtggcttcatatactttattctgtgtgcagttttatagttgttaatgtcaagagagctagtctagtttcagttaacaccatcatggctagaaatgggagaatcctcactttcattttgaaggctattttagcagagtatacacttctacattggctgtttcattctttcactctttaatgaggaaattccttgttagtactattcatgtccttggttagcaggccagtcatgctttcaggagtctagttttcacaccatcttctcttcagttcaaattactgttactttccttttctgtttccccatacctgggtccatgaagatgtatttactattactactatcattattaagacagttaaactctcctgggttcctaggtgggagagaagtttaactgtctacaagtataaggggagaactggaaggcaaaagagggtagccttttggggcaaggtgtttctctttagagagactgtaattctcttgatccccacagggtggaggtaaacttggctggtttcctagttcagtgcatactaaacctctgaacttgcttgtgtgccactgaagagagggaagacacattgaggagaaatgcggagctgatacagacaggcatattgtacacaaccaagataagtgggatcaagccgccctgtaagagagagggtagaagcagggacttctggctccctgaactgttaactgtgtctccatttttttttttttttgaagacactccactctgtcacgcagctggagcgcagtggtgcagtcatggctcactgcagccttgatcttctgggctgaagtcgtgtcttcatttttgataggaacgttattttgacaaaatgtgggacagctgatgagcctatagatgtaactctctgatgtagtcagttagtcatatgggtagctctccttgacaaactgcataggaatctcttttgtcctcttagtaggtggtaattttcccctgggtgtgggatggctaagaaggacttgcacaattacataaccatgggtgacatctccagaaagaaaacctccgataaacatgacattttctcttttggggcatttggattcagtgcattttattggcaactgtcctatgtgtttaaattcctagaactgaaaccctggacgcacggtagctcataattcttgttacataagataatttgtttattgttttagttttcaattagtttttccttaacatataactgagtgcatcataaacaatttgctttagaatttctacttccagggctgttactgactggatgcagtgcacaaagacatacgtataagactatttttttgtgatattttagagcaatggtgaaaagttgggaacaacttaaatcgttttcaacagaagactaatgaaataaattactgaaacttattcacaaaatggaaatctaggcagctgtaagaaatggatatgtgctcttagggatttaaaggggtgtgtataacattatcccataaagactaaagtgtggtacgtgtgtacatttatattaatatgtatgcaaatgtgtagaatatagaaaaattcagacactatgttgtaaacacagttactttggggaggagaggaggtgcgatgagagaataccaaccatggctgtataatctctatttctgaacatacacaacatttttcaagaaaatatattactttattatttgaattattattttcagccatatgtatagactgaaaggagagagagacaaggagacagaaagagacagtgacagagaggacagaagagtcacaaagagtgggaggagagaaagggaaggaccttagccacagaaagttgagaggagagtaagttggaagaggtagtgattagagattttgcgcattgacagtggttgacttggcttctggggtaggccctggaacaaagtcctctgatcctcggttgtttgggaatagtcaattatgtaagggtattctggtgctaccagttttgtgcaatggtgggcatttactgctataaacttccctcttagacctgcttttgctttttcctacagattttggtatgttgtgtttccattttgtttgtctcaagaaatttttaaatttcccttttaatttcttcactgacccaatgattggtcaggaacatgttgtttaattcccatgtctttgtactgtttctgaagttcctcctgttacggatttctagtattataccattgagttagaaaagatacttgatatgatttcagtcttcttaaatttgttaagacttgttttgtggcatacatatgatatatcctggagaatgctcatgtgcagttgagaagaatgtgtattctgcagctgttggatgaactgttttgtataaatctattaagttcatttggtctagagtatagtttgaatctgatgtttctttattgattttgttttgtctggttgatctgtccattgctgaaagtggggtgttgaagtcccctactattactgcattgctctctctctttactattactgcatctgtctctctcttcagatatattaatatgttaggccattcctacattgccataaagaaatagctgagactggataatttatataaaaaaagagctttcattgactcacaattatgcaagctgtacaggaagcatggtgccaacatctgcttctgaggaggcctcaggaagcttacaatcatggcagaaggcacagtgggagcagaagctagagagagagtgtgtgtgggaggtgtcacacacttttaaaaaaccagatcttacaagaacttatcaccaagggatggcactaagccattcatgagggatatgtccccatgatacaagcacttcccactggtgccccctccaacactgggtattacatttcaacatgagatttggtgggaatacaaagatccagaccatatcattccacccctgtctccacatctcgtgtccttttcacgttgcaaaatacaaccatgccttcccaacagtcctgaaaagtctttactcattccggcatcaactcagtcaaaagtctcaagtctcatctggacatgaattccttccacctatgagcccgtaaaatcaaaacaagttatttactgccaacataccatgggagtacagctattgggtcgctctccaaaagggagaagttgaccaaaagaaaggggctacaggccccaatgcaagtttgaaacccagcagggcagtcattaaaacttaaagctcctgcagtgagccgagattgcgccactgcactccagcctgggcaacagagtgagactccagctcaaaaaaaaaggaaaacaaaaaacaccaaaagaaaacaaaacaaaacaaaaaaacttaaagctccaaaatagtctctcttgactccagactgtagtgttgggtgcatgtgtatttcatatagttaagtcttcttgttgaatctgaccctctatcattatgtaatgcccttctttttcctttttgatcattattggtttaaagtctgttttgtctagaataagaatagcaacccctgctcttttttgttctctgtttgcttgatagatctttctccatccctttactttgagccatttaatttgagatgggtctcttgaatacagtatacagttgggtcttgcttctttatctaacatgctcctctgtcttttaagtggggcatttagcctgtttacattcaagtttaatattgatatgtgagggtttgatcctgtcatcatgttgttagctggttgttatgtagacctgattgtatagttgctttatagtgacagtgggccatatacttaagtgtgtttttgtggtggctggtaatggcgttttgtttccatgtttaacactcccttaaggaactcttgtaaggcaggtctggcagtaatgaagtcccttagcatttgcttgtatgaaaaggattttcttttctcctttgcatttttgttctttgcaacaacaaagaaaccatacaggaacattggttgccttctgggacaccaacaattcaaatattttattgctttaatagtgcttcatatttcatgtaggctccactcattcttttaaattattttttctttgtttttgtctgactaggttacttcaaaagacccatctttaagttctgggattctttcttctgcttgatatggtctatttttgaagcctttgagtgtattttctatttcattcaatggattcttcagttctagaatttatctttggttctctttaatgatacctatctctttggtgataaatttctcattcatagcccgaattgtttttctaatattgttggtttttttgtattgtatgtcattgagaacaactcacttctttaataacaacatattgaattttttctgggatttcataaattccttttttttcttgttttttggagatggagtctcgctctgtctcccaggttggagtgcagtggtattccactgtccactccaatctccttctcctgtgttcaagaaattcttgtatgtcagcctcctgagtacctggaattacaggtgcgcaccaccatgcctggctaatttttgtatttttagtagagacagggttccaccatgttggccaggctcatctcaagctcctgacctcaagtgatctgcctacttcggcctcccaaagtgctgggattacaggcattcgccaccacacctgacctcataaattcctttttgattgggatctgttgctagtgaattattgtgttcctttggatatttccttactttttcatgtttcttgtgttcttacgttgatatctgcacatctggtgtaagagtggcttcttccaattttttgaatttgctctcatggggaggatttttttcctgaagttgtatctatgatgttggttgggtagggaattttggctttgattgtgggtacatgcagtagtgtagtctctgtgtgatttattttggctataaacagcatcagtggtgtctttcattttctcagtggcttagggtgcaattgttagtgaaggctattatgaagttttgctggagactgggatgccaggtaggccaggttttgggccacggtggcagtagtgggctgaatgtgcctgtctttgggccccagggtggcatacactggcatcagtgttagcaggtccaggcaggccaatcgttggtcctccaggtcgcttgatcaggtattgagaatagcagtggtatttggatgggtggacaggttcttgggccctgggcataagtagcatgggcaatggcagtagcagtgatgggacaatcctctgagacccaagcagtctgtgctgatgttggtggtagctggggtgcactaggcaggccattcctcaggctcacaggtggcacctgcaggtgggtgctggctgtggtggtagtggcaggctggttgggcctaacctcagatgttaagagaagtgttcaggtgctatcagtagtagaccaggttgcgtgatctgcaggcccctttgatgggtgctcaggtactggggaggtggagctgtgccaggcagacctgttctcaggcccccagatgatgtatgtaggcactggctctggtaatcagggatagggtgatcctcaggctgccagtggaatgctcagttgagggcagcaggagctgcactgcggccatgctactgggaacagtgagactgcttttagtgggagcagcgttaggcaggtggctggggcatgtgtgctttgcctgtgcctcaaccctgcagtagcctgcaagtggcagcaggcagtggaatttgtccttggggcatgagaaaatgcatgactgcccctctactgatgggaaagggttgctgtcatcagtttccactttggtcctggcagtgggtggggaatgtcagttgggctccagggatatcgggatgtgagggctgtttggcccagggaaggatgcagtctagtggaggtggagctcatacaatggtgccttgatgcagctgattaggacttaggagtttgtgggactccatctcattggagcaatgccatagtgcagtctccagacagctccctatgttagtctcaggacctgtgagggctgaggggctctcctgtggctaggactgtaggaatctgtggtagaaatgtggaccactgggggtctctcaccattcgcccagttgattctggctcggcaggccacttcacttttctctccttccttgcttttggtgcctcccattacttctctgttgaattctaatgtcctctttcagatgatctatttgaagtgtcattatctatggactattttgtttcctctccataaaagaggcaagtacccagtgcatctagtcagctgtgttaaagtctttcctttattctgtgtcttttgattggataatttgatccatttacattgtttattatttaagataagggctttttttctgtactaactaatgaacccatatgtttaattgtcagactttattcagcaccactgagtctcaatatcaaaacaactaaaatttaagacacaaccttcaattgtaacatatatatttacacttcgtgttcattatattgttgaatggtgccatcattcatctacttggctaactgctaaccagaaattaaaactcttccattcagcttcttgtcattgatttacaaagatttattgaacactttctatatattaagagcttaattgtgcactagaaatataaaaataacaagataatatctgttctggagttgaggcatttgggtgacaataaatgaagttacaaaacaatgtgagaagaggcgatgagaatacaaagataaagacatatctagagctcttctggagtgatcatgtcatttgagacctcacagatgaagtaatatcatagcctactgttgtatgttgattggggtttgagaagattgaaaaacaaaacaaaacaaggatgtcccagacagaggaaataatcagcaaagctataaaggattgaaataggaaaaggaagtcattctatgaacatgactgggttaaaggcgctaatgtagactctggtagatcttaaaagttatttataggtaaggactttctactgctattttgtttattgttttatagatcctttgtttctttcttcctgtcttactgttcctttgtggttaagtgattctctctagcagtatattttgattccttactttttatttttgtgtttttatctactataggtttttggtttgtagttaccaaaaaaaactttatagttacaagaaaaccttatagttatcatatgttattttaagctgataacaactttgataacaaaaaagcccacctctacacttttactgctctgcaccttgtattttgaattttgatgtaatcatttacatctttttatgtcgcatatctcttaacaaattattgtgattatttttaatagtttttaaaccttcatgtgaaatacatgtgatttatacaccactgttacagtataattctaaatttgactgtatacttacttttaccagtgaattttgtactttcagatgtttttgtgttactcattagcatttttttctttcagcttgaaaaactccctttagcattttttgtaagatggctctggtggaggtaaactcccccagcacttgtttgtctgagcaagtcttatctctccttcatttctgaagaagatccttttagggtatagtattcttggtggtaggtttttttttttcccttctgcactttgaactctctcaggtctgtaaagtttccgagaagtctgctggtgagcatattgaaactcccttatatgttatttgcttcttttttcttgttgctttcaggatcctatctttgtctttgatttttggcagtttacttataatatggcttggggtaatcttatttggattgaatctggctagagtcctttgaccttcttgtacctggatatttacatctttctccaggtttggaaaactttctgctattatttgtttaaataagctttctacctcttggtctccctctttaattccagtgacccaaacatttgctcttctgatgctgtctcataaatcccataagctttcttcatttctttttattatttttttcttttttcccctctgatggtacattttcaaataacttgtcttcaagttcacagattcttttttctacttgattagttctgctgtttagactctgtattgcatgtaaaattttgttcattgtatttttcagctctgggatttctgtttgagttttttaaaattatttcagtctttgctaaatttcttattctagccacttactgttttcctcatttctttgaattgtttctctgtattttctttaagtttgctgagcttcctttaaaaagttattttgaattgtttagtaaggagttcatatttatccatctctttattgttagtcactggtgctttattttgtctccccgctaatgtcatatttctctgattgttcttgatcttgtggccacacgtcaacatctgcatattttaagaagtaggtacttatttccagtctttgtaaactggctttgtctgggaacgcccttcaacaataagcctgtctagatagcctggacagactggtgtgatctctgtgccactgtggccattacaactctagagggtgacctatgctggtacgtgatgacaagcacgttgcccggctggaatctcatggcttctgaggctggcacagagctggcatatgcctgaagcctgtggctgctggtgcctgcctactgccaagatttgtctgtagcccagggcccaggctagcagtgatgcaaactgtggattgagctggccttgcaggggctgtgggttcccatctggttcccgggcagctctggaagcttagtccataggtactgatatgggttgagcggttgcaggggtctgcctaatgcagggttttactgtggaagatccagtattagggtccaaggcaaaattttgtttactttcctctctttccaccaagcagacagtatgtatctctctctgtgctatgctgcctggggttgagtgaagggtaatttgggtgacataaaattgttcttcctactctcttcaatgcatcttttcttattatgctataactaggtactgtgatctctcacctggtttccttagctcttttgaaggtatttttgtgcatgaatcattcaaattgatgtttccgtgtgggcaatgattactagagagtcctaatgcaccatcttgctctgcccttcttcccaaatgcctgtagcctcatagaaaaacatttgtaagaagtagatatctagggaaggattccactgagaagtggtccacatttatgtttttaaacagcacgttttagtgtgaggaggccattaagtggggatatttatgaaagaatataggcaaactgttacttagaatgtcttcagttctgtaaggtgcttggcatgtaaggtgcttggcctacatatttctttcaaattagtacacagtcaaaaactttaatcagtatacaaattattctgttagaagagacacttgtgttttccatgtttgtgtttctccttaggagttgtatttctgttgctgagataacctattgttatatcctagtttatttataatatgttttgtaagaaagactgatgtcattcattgtaggtgtaaaacaggcttaccatgaaatgaaagcctttgttcaacttagagtcctaatgtttctgatttcttactcttgttgctgatatacagaagcagctacaagagctgaaagatgactgtgcacttaatgtctttagttgaaagaattatttagctaaagaaacacagtcattagctatggaatttgagagcctcaacagtttcaatgacaaatacaaaagcatttttaaaaaatgaactcaaacagcatgataaatttttatataaaaataaagtttcaatttattttttaatgcctttctgaattactggttaaactaaaatctataaaaatgcaatgcattaagtgtatataccataatcaaaagtttgaagtgtcacatttcttctataatggggagaaattaatcacatttggtaaacattttttacgttcaaacctggatttcaagataagttaaataattactttcattcactgtcaaggctctttcttgattcacattttgaggttgtttcttttcttaatgcaatactaactttgtgttgttgtttgttagagattggggtcttgttctgtcacctaggctggcctgcagtggtgtggtgatggctcactgcaccctcaaactcctgggctcaagcgattcttctgcctcagtcccctgagtatctgggactacaggcacacagcaccactcctggctaattaaaaaaaattttttttttttggccagccacagtggctcacacctgtaatcccagcacgttgggaggctgagacaggtggatcacttgaggttgggagtttgagaccagtctggtcaacatggtaaaaccctgcctgtaccaaaaaatacaaaaattagctgggcttggtgatgtgcgctggtagtcccagctactcaggaggctaaggtgggagaatcacttgaacctgagcggctgaggctgcagtgagctgagattgcaccactgtactctagtactccagcctgggtgacagagtgagaccctgtctcaaaaaaaaaattttttttttttgtagagatgggatctcactgtgttgcctaggcttgtcttgaactcctggcctcaagttatcctcctgcctcagcctcccaaagtgccaggattacaggtgtgagccatcatgcctgtctgtaatacctaatttttgaccatttattgaaattgttattttatcagataatctaagttataatgtagttgatcttttaaaagggcatactgtctctctaagtagaaatggctccaaaatgtttttgggaagtttgatacttttatatacaaggtagccttaaccagaaaagtgacaatttaaaattgacaaaatgatatttttaagacttcaaaatgataaataatttttaactattaaagttcgcctcaagctaataaacttaagtctgtaaggaaattaaaattaaatattagtttaataacaactaaatatttagtagaagttgcctctctttattggtgatttatttttaattataaaatttttgaagatctttgcttaaagaccttgatatttgaaatagttggacacttgatgaggaaattgcctttatgattatgaaaatctcagctttataaaatgcatctgttaataaagataatttctctaatggtgatcaaaatataaaacttaagacattaatatctcactggaagtgtatatgggtttctgagtaattaaaacattcataagcagaataaaatgcattctcagaaaactagaaatatcagggaccttgcttaactttgtaaaagacatctacaaaaatcctacagctaatgtcatatttaatggtaaagatggaatgttttcctcctaaggtcgggaacaaggcaagggagtctattttcactacttctattcatctttgtcctggaagtcctagctagtgtaatgaggcaaaaacgcatgcagattggaaaataagtgatgaactgtctatttacagacattattgccgatgtagaaaatcccaaggagtctataaagaattcataggacaaataaattaggttagcaagttcacagactaccaagtcaattaatataaaataataaaatgtatttctgtagactataaacaatagtctatggcacaattcaaatttgaattgttcactgtctgtctgtttgaacaattcaaatttgaaattaaaagcaatttaaaattgtatcaaaaattaaatatctaggcctgaatcaaacaaaatatgtgtggatctgtatgcatgaaagttaaaaaactgatgacataaagatctaaataaaaggagagatatactgtagccatggactggaagactcattgttagatgtcagtattcttcaccttgatatgtacattcaaagcaaacttaacagccttggaggatttttttttttttttttttttgccaggggtagggggtcagtattgtaaagctgattctaaaatgtgtaaggaaaggccaaagaactagaatagctaagacaattttgtaaaagaagagcaaagtttagggacctgattctgaggctttttataaaggtgtagtaatcaagacagtatcttattggtgaatggaagaacatatagattgatggaatgtaatggaatatccagaaatagacccacacaaaaatggccaattgagttttactttttatcaaaagtaagaaaacttattttgcagaggggttggttttaaaaaaatatttagattgattttattggataagcaatgtatgaatatatatgtcctattcaaaatgatagaagtctatagagctgaaagtgaaagtctccattacctcaccccaatctgtttttgttgtgctgtaattttgtttttttctttttcttttttttttgtgtgtttttaaattttattgtattttaagttctgggatacatgttcaggacatgcaggtttgtcacacaggtaaacgtgtgccatggtggtttgctgcacctatcaacccatcacctagtattaagccctgcatgcgttagctatttatcctgatgctttcccctcccctgcccccactgacaggccccagtgtgtgttgttcccctctctgtgtccatgtgttctaattgttcagctctcacttacaagtgagaacatgcagtatttggttttctgttcctgtgttagtttgctgaggataatggcttccagcttcatctatgtccctgcaaaggacatgatctcattcctttttatggctacatagtattccatggtgtatatgtgccatgttttctttgtctagtctatcgttgatgggcatttgggctgattccatgtctttgctattgtgagtagtgctgcagtaaacatacatgtgcatgtatctttataatagaatgatttatattcctttgtgtatatacccagtaatgggaatgctgggtcaaatggtatttctggttcttgatccttgaggaattgccactgttttctacaatggttgaactaatttacattcccaccaacagtataaaagcattcctgtttctccacagccttgccagcaactgttgtttcttgactttttaaataatcaccattctgactggcatgagatagtatcttgttgtgattttgatttgcatttctctaatgatcagtgatgttgagcttttttccatatgtttgtgtgtcacataaatgtcttcttttgagaagtgtctgtttatatcctttgcctactttttgatgggttgtttttttttcttgtaaatttgtttaagttccttgtagattctagatactagacctttgtcagatggatagattgcaaaaacattctcccattctgcaggttgtctgttcatgctgatgataatttcttttgctgtgcagaaactctttagtttaattaggtgccatttgtcaattttgctttggttgcaactgcttttggtgttttggtcatgaaatcttttcccatgcttatgtcctgaatggtgttgcctagattttcttctagggtttttatagttttgggtttcacacttaagtctcgaatccaatccatcttgagttaatttttgtgtaagatgtaaggaaggggtccagtttcaattttctgcatatgggtagccagttttcccagcaccatttattaaatagggaatcctttccccattgcttgtctgtgtcaggtttgtcaaagattagatggttgtagatgtgtggacttatttttgagatctctattctgttccattggtctgtgtgtctgttttggtaccagtaccatgctgtagccttgtcatatagtttgaagtcaggtagtgtgatacttctagctttgttctttttgcttaggattgtcttggctatatgggctcttttttggttccatatgaattttaaagcagtttttttctaattctgtgaagaatgtcaatggtagtttgatgggaatatcattgaatctataaattactttgggcagtatggccattttcatgatactgattcttcctatccacaagtgtggaatgtttttctatttgtttgtgtcctctctgatttccttgagcagtggttagtagtactccttgaaggggttcttcacatcccttgttagctgtatttctaggtattttattctctttgtagcaattgtgaatgggagttcatccatgatttgtctctctgcttgtctgttgttggtgtataggaatgcttgtgatttttgcacaatgattttatatcctgagactttgctgaagttgcttgtcagcttaaggagcttttgggctgagacaatggggttttctagttataggatcatgtcatctgcaaacatagacaatttgactttctctcttcctatttgaatactctttatttctttctcttgcctgattgccctggccatagcttccaatactatgttgaacaggagtggtgagagagggtatccttgtcttgtgccagttttcgaagggaatacttccaggtttgccaattcagtatgatattggctgtgggtttatcataaatggctcttattttgagctatgttttatcaatacctagtttactgagagttttttaacatgaagggatatttaattctatgagaggcgtttttctgcatctattgagataattgtgtggtttttgtcattagttctgtttatgtgatgaattacatttactgatttgcatatgttgaaccagccttgcatcccatggatgaagccagcttgattgtggtggataagctttctgatatgctgctggatttggtttgctagtattttgaggatttttgcgttggtattcatcagggatattggcctgaagttttacttttttgttgtatctctgccagattttggtatcaggatgatgctggcctcataaatgagttagagagaagtccctccttttcaattgtttggaatagtttcagaagaaatggtaccagctcctctttgtacctctggtagaattcagctgtgaatccatctggtcctgggctttttttggttggtagactatttattactgcctcgacttcagaacttgttagtggtctatacagagatttgacttcttcctggtttagtgttggaagggtgtatgtgtccagaaatttgtccatttcttctaaattttctagtttatttgcgtagaggtgtttataatgtttttctgatggctgtttgtatttctgcagggtcagtggtgctatcctctttatcattttttattgtgtctgtttgattcttctctcttcttttttagtctagctagcagtctattgattttattaatttcttttcaaaccagctcctagattcattgatttttttggagagttttttgtgtctctatctccttcagttccattctgatcttggttatttcttgtgttctgttagctttgggatttgttcttggttttctagttcttttagttgcaatattagggtgtcgatttgagagctttctagctttctgatgtagggatttagtgctataaatttccctcttaatactgctttagctgcatcccagagattctggtacattgtctcttgttctcattgtttttagaggacttctttacttctgtcttaatttcattgtttacccaggagtcattcaggagaaggttgttgaattttcatgtagttatgtggttttgagtgagtttttaaaccttgagttctaatttgattgcactgtggtctgagagactgttgtgatttcagttcctttgcatttgctaaagagtgttttacttccaattatgagatcagtttttgagtaagtgccatgtggcactgagaagaatgcttattctgttgttttggggtagagagttctgtagatatctatcaggtccacctgatgcagagctgagttcaagtcctgaatacccttgttaatttactgtcttaatgatagtctgatattgacagtgggtgttaaagtctcccgctattattgtgtgggagtctaagtctctttgtaggtctctaagagcttgttttatgaatttgggtgctcttgtattgggtgcatatatatttaggattgttagcttttcttgctgtattgatccctttacgattatgtaatgcccttctttgtcttttttgaaccttgctggtttaaagtctgttttgtcagaaactaggattgcaacccctgctttttcctgcttttcatttgcttggtaaattttccttcatccctttattttgagcctatgtgtatcattgcatggagatgggcttcttgaatcttgaatacagcacaccaatgggtcttgactctttatccacattgccaatctgtgtctttttttttttttttttttgagatggagtctcgttctgccacccaggctggagtgcagtggtatgatctcagctcactgcacttctgcctcttggattcaagtgattctcctgcgtcagcctcccaagtagctgggactacaggtgcatgccaccatgcctggctaatttttgtatttttagtagatatgtggtttcaccatattggtcaggctggtctcgaacttctgacctcaggtgatccacccgcctcggcctcccaaagtactgggattacacaacatgcatgaaccactgtgccaggcccaatctgtgtcttttaattggagcatttagcccatttacatttaaggttaatattgttatgtgtgtttgatcctgtcatcatgatgctagctggttattttgcagactagttgatgcagtttcttcatagtgtcgttggtctttgtacttcagcatgtctttgcagtggctgatagtggtttttcctttccatatttagtgcttccttcaggagctcttgcaaggcaggcctggtggtgatgaattctctcagcatttgcttgtctgaaaaggattttatttctcctttgcttatgaagcttagtttagccaaatatgaaattctgggttggaaattattttctttaagaatgatgaatattggcctccactctcttctggcttgtagggtttctgctgagaggtccactgttagtctgatgggcttccctttgtaggtgacctggcctttctctctggctgttttaacattttttccttcattacattcttggagaatctgatgattatgtgtctttgggttgatcttctcatggagtatcctactgggattttctggatttcctgaatttgaatgttggcctctcttgctgggttggggaagttcttctggatgatagcctgaagtgtgtttttcaacttggttcctttctccccatctctttcatgtactcctatcagtcataggtttggtctttttacatagtctcatagttctcggaggttttgtttgctctttttctttctttctttttttttttttgagacggagtctcactctgtcacccaggctggagtgcagtggcacaatctcagctcactgcaacctctgccccccgagttcaagtgatctcctgccttagcctcccaagtagctggtattacaggcgcctgccactgcgcctggctaatttttgtatttttagtagaaacggggtttcaccatcttatccaggctggtcttgaactcctgacctcgtgatccacctgcctcagccttccaaagtgctgggattacagggatgagtcaccgagcctgtgcttgttcattccttttcattctttttttctcagtcttgtctgcttgccttatttcagcaagatagtattcaagctctgatatttatccttctgcttgatacctgtgttcgcatcacgaagttcttgtgctgtgttcttcagctccatcgggtcatttatgttcctctctaaactggttattctagttagcagctcctatgaccctttatcatggttcttggcttctttgcattgggttaaacatgctcctttagcttagcaaagtttattacctactttctgaagccttctgtcaactcatccatctcagcctccacccagttctgtacccttgctggagaggagttgtgatcatttggaggaggagaggcactctggccttttcagttttcagcgttttttcattgattctttctcatctatatgagtttgtctagtttcaatctttgaggctgctgactgttaatcaaggaaaatgacaagaaaagtctcaatcattttaggagatttatttgccaaagttaaggatgcacccgggaaacaggtctatgcctttctctgaagatgattttaagggctccaaatttaaaggggaaagggtgggatattgagaagtatacagttttcatgcaagtgaatctgcatttttacatacaaggacataaaaggggcagaggaaaaatgtggggaatcagcattttacataagataacacaaacagaatgtggtagggaaacaatcagatatgcattagtgtctgtgggccaggatgacagcacctggaaagataagctatcaatttgcattgccatggtgaagttttaaccattcactaggaatatccttgtgggcaaatatgggggaggcatgtagcttttcatcttgtagccatcttatttaggaactgaaagtgggaggcaagtttgcatgacccagttcccagcttgactcttccttttagccagatgcatttggggtcccaaaatttaatttcctttcagtgttttttttcattcattctttctcatcttcataagtttgtctagtttgaggctgctgacctttggatgaagtttttgtggtgacttctttgttgatgctgttgttgctttctgttagtttgtttttctttaacagtcaggcccctcttctgtaggactgctgcagtttgctgagggttcacttcaggccctattcacctgggtcccttctgcagctggagatgtcacccgaggaagctggagaacagcaaagatggatgcctgctccttcctctgggatctctgtcctcgaggggcactgacctgatgctggtaggaacgcttctgtataaggtgtctggtgacccctggttggtgggggtctcacccagtcgcggggcacaggatccgggacccacttaatgaaacactctagttgtcccttggtggaggggatgtgctgtgctggggggaaacccactcatctgggctgcctggattcctcagagctagtggaggaaagtaagtctgctggtttgtgaaggccatggccacccctcccactaggggctcaggctcagggagatcagaatcttttccctaaggccctggctggggtagctgaagttcctgcagggaggcctcgcccagtgaggagggatgggtcagggtccagcctaaagaggcagagtccacaatctgccacaactggtgtgctccactgtggggaataccttctgggtccaagacatccaatctccctggcaccagcaggggaaaaacggcagccccgagctgtagtgatggctgttgcccttccccagtgggggttcagccttttaggcagccgcagtgatgggagctcagacgtcgtaagcagcaggcagctgcagttgcagtgatgatggctggccctcctccccagaactcggtagtcttaggcagactccggcccaaccgctgttgagactgtgcagctctgtggttgggacctaaggccctggtggtgtgggctcatgagtgagatctcctgattcacaggttgcacatccatgaaaaaagcagtttccaaggctaggtaacattgaggtgggcaaataaagagagaacgttagagagagaaaaataagtttaaaaaaggcaagctttctgtactatgctgacacatcccaagggcagtaacaggcatagcctggacccaggtgaggacctgataacattatctaagtggctggagctggaaggaatgtgctctggagactttcccaggggtaacaaagaagtaaattttccctgtgtctttagcataagtaaaagtccctttgaaccccctccagtgtgtgattgtacccactctgcaagttttatgaggtcctgtttttctgtagctaatttcatgcgcgcgtctgtgtgaagagatcaccaaacaggctttgtgtaagcaataaagctttttaatcacctgggtgcaggcagcctgagtccgaaaagagagtcagcaaagggtggtgggattgtcattagttcttatacgtttgggataggcggtggagttaggagcaattttgttgcgggcagcgggtggatcttacaaagtatattctcaaggatgtggagaatattacaaagtaccttcttaagtgtgggggagaatattacaaagtaccttcttaatggtggggagggtgtatagtacaaagtacattcacaaaggcaagggaatatcacaaagtacattattgcgagggcggggagggtgtattgtcacaaagtcaattgatcagttagggtggggcaggaacaaatcacaacggtggaatgtcatcagttaaggcaggaactggctgttttcacttcttttgtgaatcttaagttgcttcaggccatctggatgtatatgtgcaggtcacaggggatatgatggcttagattcagctgagagacctgacatttctgtcttcttatattaataagaaaaatagaacaaaatagcggtgaagtgttggggcggcaaaatatttttgggggtggtatggagagataatgggcaatttttctcatggctgctttgagcaggattaggggcagcatgggaacctggagtgggaaagattaaagaaagattttggggtaaggggtgatattgtgggtttattagaaggaacatttgtcatatagaatggtgatggcctggatgcagttttgtatgaattgagaaactaaacagaagacacaaggtccaaataagagaaggagaaaaacagatattaaaagactaagaaatgggaggacccaggacatccaattagagagtgcccaagggggttcagtgtaattatttgcttggttggtgagtttttgggctcaatccttgagtttttgatgttgtcatataccaggccagattgatttaggtaaaagcaacactcttcttttaaaaaatatacagagtcccctttttttttagcagtaagtcaaagcctcggcgattttggaggaaaaagaaatgcaaagccaacaatcgtttgttaaagaaggtttagaaacggctaggagagagtgagtgagattgatagtgtggtggaggtagctggggagaggtagagggtggcacaagaacgggaatgagaataagagtgagtgtaaaagtaaagaataggacttcatcagggtgaaagtattggagtgtgccctgtgagcaaagatcatctatccactccaagagggagtcaagagtggcggattggggatagtactaggagatatccgctgtgatggtttggaggaaaaatgtaaactggcagtgtaaacaggggcacgacacttatgagtagttgagaatggtgaataggaatatgactagacagaagatagtagggatgacaagtttttggggtgcaatccaagtgggaggggtgaatgcgtaaagctttgttgggaagagtagggtaaggacgaagagacctaataaaaatgataggatgtattaggcttataagggttactattatcatttaggaatgcgggtgagtttaagggaagtagggttgagtacttgcgacttccaggaggaagaggagagatcaggctgtctgtctgacagacaaagctttattctggaatggtgaacccaatggggagggtcctgcaggcggacagcagttggggtactagagatgactaagtagggtccagtccatcgaggttgtagagtttgaagggtcagatttttaacaagaacttatcatccagctagggtgtcttcatatggctgggaatctggagtaggcaagagaagatgagcagcctggcaaatttcctgtctagcctgctggaagactggaagatagtcgcctagagggctggtgtctggggcaaggttgggtccgagcaagaaagtgcatccatataaaagttcaaatggactgtaccctgtagcatctcgaggacaggctctaattctgagaagggcaagaggtaaaagtactgtccagtcctttttaagttggaggctgagcttggtgaggtgtgtctttaaaagaccattagtccgttctacctttcctgaagattgaggacggtaaggggtatgaagcttccactgaatagagcctgagaaactgcttgggtgatttgactaataaaagctggtctgtgatgagactgtatagaggtaggaaggccaaaccaaggaattatgtctggaaaaagggaagaaatgactgcggtagccttctcagatcctgtgggaaaggcctctatccatccagtgaaagtgtctacccagaccaagaggtattttagttgcctgactcagggcatgtaagtaaatcaatttgccagtcctggacaggggcaaatccctgagcttgatgtgtagggaagggagcgggcctgaacaatccctgagtagtagtagaatagcagatggaacactaagaagtgatttccttgaggatagatttccacgatggaaaggaaatgagaggttctaagaggcaggctagtggcttgtaacctacatggaagaggttctgaaaagatgacagaatagaatgggcctgtgaggctggaaggagatatgttccttggtccaagaaccatttgccttgtgtgagaggagattgataggtggaagttacagtgggagagtaggtgggagtgactgatgagaaggagaaaaactggccatgagggacagaagttggaatgctagctgcttcttcagctacctaatcagcataagcgttgccctaagcaatgggatctgatgccttttgatggcccttgcagtgaatgactccagcttcctttggaagtaaagcggccttgagaagagtttttattaaagatgcattaatgatggaggacccttgtgtaatgaggaaacctctttcagcccatataacagcatgatggtgcaggatatggaaggcatatttagagtctgtataaatattgatgcgtagtccttttgcaagagtgagggctcgagttaaggcaatgagtttggcttgctgagaggtagtggagtggggcagagcagtagcctcaatgatagatgtggaagatactatagcatagcctgcctttgctagtgattggtgattaggcttggtggaactgccatcaataaaccaagtgtgatcagggtgaggaacaggaaagaaggaaatatggggaaatggagtgaatacaagttagatcagagagatacagttatgggggtcaggtggggtatcaggaataatgtgggaggctggattgaagtccgggccaggaacaatggtaatcgttgcagactcaacaaagagtgaatatagctgaaggagccaggggcagaaagtatatgcatcaggtgtgaggaagaaaatagattttggaagttatgagaactgtagggagtgagttaagcatagtttgtgattttgaaggcctctaaaagtattagagcagcagcagctgctgcacacagagatgagggctagtctaaaacagtaaggtcaagttgtttggacagaaaggctacagggtgcagtcccagctcttgtgtaagaattctgactgcacagccctgtacttcagctgtgtgtaatgaaaagggttgggatgagttagggagagcagcttttagggttgttttttaaggaatggaaaggggaatggggaaaggatttaggatttatggggtcagctaagtttccttttgtgagtttatataatggtttagtcaggatggcaaaaccagatatccaaaggagaaagtaccttaaccatgcctaggaaggaaaggagttgttgtttgtagaaggggttggggtttgggagattagccggacacaatcagcagggagagcacgtgtgtttttatgaagaaaggtgctgagataggtaacggatgaggaagaaatttgggctttggagggggatatgcaatatccttttgagaatagatgttggaggagcaggagggtgccctgttgggaagacttgtagggtgggctataaaggagaaggttgtcaaaattttgaataaggtgagaagcagatggacagaaagaaagtaaatcatgagaaagggcttgactgaagtaatgggggctgtccctgaagccttgtggcagtacagcccaggtaagttgctgggactgatgggtgtcagggtcagtccaagtgaaagtgaagagaggctgggatgaagggtgtaaaggaatagtaaagaaagcatgtttcagatccagaacagaataatgggttgtggagggaggtattgaggataggagagtatatgggtttggcactatggggtggataggcaagacaatttggttgataaggcaaagatcttggaccagcctgtaagacttgtctggtttttggacaggtaggataggagagttgtaaggagagtttgtaggctttaagaggccatgttgtaacaggctggtggtaacaggctttaacctttttaaagcctgctgtgggatgggatattggcgttgagcatggtaagggtgattagattttaatgggatgataaggggtgcatgatcagtcgccaaggagggagtagagggatcccatgcttgtggattaaggtagggagatacaaggggaggattcgaaggaggctatgaactggggaaaagggtggcagtgaggtgtggctgtagcccaggaatagtcagggaagcagataatttagttaaaatgtcttgacctaataaggtaactgggcaagtggggataactaaaaaggagtggataaaagaatgttgtccaagttggcaccagagtgggggagttttaaggggtctcgcagcctggccgtcaatacccacaacagttatggaggtaaggggaacaggcccttgaaaagaaggtaatgtggagtgggtagcctccatattgatcaagaaggggatggacttaccctccactgtaagagttacctaaagctgtgatggtccaggaggtttccaaggtgatcgggcagcgtcagtcttcagccactaagctgagaagatctgggaaggagtcagtcagagagccttgggccagagttccaggggctctgggagtggctgctaggcgaattggacagtctgatttccagtggggtccgcacagatgggacatggcttaggaggaatcccaggctgtgggcattcgttggcccagtggccagatttccagcacttgaagcaagatcctgggggaggaggtcctggaggaatgcctggctgctgtggtttaggagtttcaaagttcttgtgtgctagaaatgtgtgggtggggtttctctcacagtggaggcaagtaattgcaactcagaaatatgttggcacttggctgcctcttttttattattgtacaccttgaaggcgaggttaattaagttcttttgtggggtttgagggccggaatctaatttttggaactttttctaatatcgggactggattggataataaaatgcatattgagaataagacagccttctggcccctctgggtctagggcagtaaagcatccaagggttgttgccaaatgggccatgaactgggctgggtttttatatttggtgaaaaagagcctaaatgctaactgatttgggaaaggtctgatagagaaaaaggagcattaaccttgactatgcctttagctccagccacctctttgagaggaaattgttgggcaggtggcggagggctagttgcggtacaaaactgtaagccagaccaggtgtgaggaggggaggtgatagaaggattatagggtgggggagtggaggccgaggaagaattgggacctggctcagcctggcgaggagcagcctggggaggaggggagaggtcagatgagtctgtagtaaaggaggattcaaaggactcagagcttggggtggagactgaaggaacagtcaggagagaaagaaggatttgggatgggtcgcattgtgagcagagactagggaggaaccgaggtgtaaaagaatgcctggacatcaggcatctcagaccgtttgcccattttttgacaaaaattatctaggtcttgtagaatggagaaatcaaaagtgccattttctggccatttagagccattatcaagtttgtattgacaccaagtaatgttgcagaagaaaataaaatgcttaggttttaggtcaggtgagagttgaagaggttttaagttcttaagaacacaggctaagggagaagaaggaggaatggagggtggaaggttgcccatagtgaaggaggcaagcccagagaaaagagagggtagagacatggaggaggagggagtggtacttgccacccaggggaggtggtgcttgccacccaggggaggtggtacttgccaccaaggtgaaggatcaaggcaggcatccccgcagtgatcagacatccctgaaatgtgggtgaataatcaggcaggcatccccacagtgattaaacaccaacggaagactgtctggagtgaccagcgctggagttttgagtttatggataaaacacgtctcttctgtctctaccagaaagggaaaggaaccaaaattaaggaagggagagattgaagggtggagcaacagcaagagaggttggagaagagagtgaaaagaccgcttacctgatttgaaattggtgagatgttccttgggctggttggtctgaggacccaagatggtaggtggatctcctcatggagtgagggtgaggacaggggactggtctcccgaaggagtccccctcccccgggtctttggcaccaaatgtcacgtgtgtctgtatgaagagaccaccaaacaggctttgtgtgagcaataaagctttttaatcacctgggtacaggtgggctgagcccaaaaagagagtcagcaaagggtggtgggattatcattagttcttataggtttggaataggcaatggagttaggagcaatgttttgtgggcagggggtggatcttaccaagtacattctcaaggatggggagaatattacaaagtacttttttttttttttgacggagtcttgctccgttgcccaggctggagtgcagtggcgcaatcttggctcactgcaagctccacctcccaggttgacgccattcttctgcctcagcctcccgagtagctgggactacaggtgcccgccaccacacccagctaattttttttgtatttttagtagagatggggtttcaccatgttagccaggatggtctcaatctcctgacctcgtgatccacccacctcggcctcccaaagtgctgggattacaggcgtgagacaccgcgcccggcccaaagtaccttcttaagggtgggggagaatattacaaagtaccttgttaagggtaggggaggatattacaaattaccttctcaagggtggggagggtgtatcatacaaagtacattcacaagggtgggggaatatcacaaagtagttatcacaagggtggggagggtgtattgtcagaaagtcaattgatcagttagggtggggcaggaacaaatcacaatggtggaatgtcatcagttaaggcaggaactggctattttcacttcttttgtggatctttagttgcttcaggccatctggatgtatacatgcgggtcacaggggatatgatggcttagcttggactcagaggcctgacactaataactgtaagtttctgtttttcgtctgagctgcataacaaaggtcacaagacatgttcgagtaagcctagattgtagccctccaggcaccacagcaaaggacataagtttggacaagattcctttgagcataagctagataacagccatcggggccacatagcaagagacacacgtaaacctgagttatgaacctgtcactgtttgataaactgcctttgttctgcttctgtacattcacttttcatgccactcagaagaaggtgtataagcaagaccctgtctttgttcagggcgcagtttttggatgttaagtctgctgggtctgagtgtactcaataaagatgctcctgtatttcaccctcaggtctctctggtcctcctgattcctgcaacaacacaatcactcactgccttttttggctgaggatgggggctccccttgtcccctgtggctctccagtgttggttttatgatacatcaaaaactaatattatactttcatattctcattgcttgtttcatatcagtggcagcaatttttccaaataatttagtatacaattaaagtggcaatgtagagtttacttaatggacttgttataattaggaaccagttttatacacagagaatccataaaaatacaacttttttgctattttatcctttggctatgcaaaaagttgttcaatgtttactgtaggtgtttgttttaagcatgcaatacagtttatagtggagataccttctgacaagaagtaaacacccagaagtgatttttgtcttcattagaactcattactatttgtctgttttccaagatgatacgatacatcatgatcttatattttaaaattctgtttctatatgtaatttaaataagttattttacttatacaattaatgtttcattctgtatttaaatttcctgtaagaaatattccttgatttaataatgaggagctttgttatttttttaaaatatggtgacatgtttctttataattatgtacaattttttttacttctagcaacataaatactgagtcatttattctttattgctcataccccagggtagttgttgagttatcttacatgatgtaagtaccgtcttttgcagtactttatactcttcgtttgttttgttatagccagaacattataaaatccagttcttagatcagacatatgttgaaagtaaccctttttccacttgaattgttaaattgtttaatctagcatctttactcctacaacttgcagtaccattctttgttccagcacattggatgtcacctctatatcagttggtcctgtcccaatagtggcagaatgatatcaaaaagtgaaggtctcagtgtaatatgaagcctcagtttttaaaataagtatgtatatctgttggatattctggtggtagtctcaaaaggatgacctgataaactgacaggcatctttaattaatgggacaacactgagaggtattcatatggcaataaaaagagaatagaagagttaagcaataagccacccacaccgctctgtgagcataatggatatgatcacacccacattgccaagtgtgtctgccaaaacatatggaaatacatctttcttctagcactcatgcctcattaatggctgtaactgtttcacagtcatggtgtccacgtatatgatactaatggctatgattagatgagtcacatcttcattgagtagctcaataggtattgttatgggcatagataccaatcaggtttactaccagccccgtagctgagactggtgttaatatgtgtatctagtcctagaggatcaattgaaccactgactaacacaaaaacaagttttgccattagaaaaatctattaatagaaacccaaacctcaccattatgaagtatatccatgtaacaacctgtaaatgtacaccccgagtctgtacaaataaaaaagattacattatgatgaaatggtgaaacagaaagctttgttacatggaacttttcctgttgcattcaaaactgcttcattaaatagtcctgcagaatagactctacgactttcaaagctaggagaaattggagtgaccagtttattccttttatgaagaattatccctgagatgccgaacatctgtgtgtcagaagctcccagctaactttcaaaaggcagtttaatttccaataatagtaattcaacaaaactgagagtttaaattaggcaatttaactaataggcaagtattctttgttgtgcttcacatttattttggaggtccaagatctgcaattatgacaaaaaccaccaccaccacctgagggtacattctgtttggccttaaataattatagtggcccccaccccatgtcagaaattggtttcagagtggactagtgaccctgtttttccaatgagaaaggaaaaaagctgtggggcttctaggaaggtccctccttcctaagaaaaagactgagaatctctttggatctctggacattgctgtgtttggatgtgataccagaactgttccatccatgtgccaggagcctggaggcgaaaccagtacagtcaggaccacaaagcatagatgaacacaagctgggaccttgaggacatggatgagtggctgaatcaaacagccctaaaacttgtttgaccttagaactttcaaatatgttagagaatagattttctaatagcttaagcctgcagaggaggagtgggagtagacagcttgtcgctgtgatggctgccagtggctgaaagtgatttggaagaatcatcacattctggatgtaatgtaatgttttggtttggtttttacaaatctgctatcaaattgatgatgtggctcatacttggtaatggtgtcaaggaaatacagtacattagagctgctgctcagagtggaaaggtgcatgttaggaaagaggtcaattccttcaaaacacttgtaagtttgttttaataccaattgaaatacaaatggaattttcttggagaaaagaaaaagtctattaataaattgagagagaatttctatttgggtgcacccataggagaaaaatcccattgcattccatcttttcatcagggcagcaataaatatcatgactaaaacacatctgtcatagagtgtgtgaaatacatctgagatgagacccagactgctggtcaacacatcatagaatgattctacagaggcaaaaagcgttccgtcctctcttagagggagatgaaaagacgttggtagacaaaatgaagacctagtactcactatcactcctccagacaggatgtgttctgcactttcctggtatgccattttgttcatagcctgaagtcagactgttgttggatgtattcagaaatttccaaagcactaataaaaacaggaaaggatcaatcatggggacatttggaaacttccattttgactgaacaaatggaatccacgtagatatccaggattacgacaaagaagataagcattgtggaagccataaagggagaaatccaagatttatctttaacctcagttgtcacaggaaagacaatgacccatgggcacaagagaagcaggaaataagatgggataaagcttgaagacttttggctccactgatgtctatagagagctttctgggagctgtatgaaaaccagctttacaccacaaagccaagactagcaataatattccatgcttgttatctgccatgtctaagaaggcaatggttgtgtaaagcatgtaagttagagccctgaactaccctaattaaatggggtgttcagccgttttagccttgagatcatcactgtcaaaaaacagcaataaatagatgacagcaataatgaagaaagcagtcccctgtattgaagttctgctctgtgttacaaaaagagcttggtttatggctgtatttcttagagatgagagacaaaatatacagacaatggccagaccacatataaaaacagaactctgacccataacctacagcagcctgcctaggaaatcaacccacttttctacaataaacagcccaggaagccacttgctgtaagtcacacttgtaggaagtcagactttctctggtaacaatccaggaaactaaacagtaactccagtaacagtcagctccaaatggccaggactttattaataactgacaacttcccaaatttttgttcctgtttctaacttaggagcaacgtaggaaagccaaatacgtaccctaaaccaatcccataggatgctgtgcatctagttagctatcctcagcttccccatgccaacagcctccaatcagggaacatgcgaaaaaaagggtgataccttttccactataaagctttcctactcctctgctggtctttgagtctctcccaaaatggaagtgatggtggctgacttctttgttgtagaatagatagcctttactttcttatttggttagtctttgttttcacagaagttattggcgaactccatttattaaagtcatgggtgctgatatggtttggctctgtgtccccacccaaatcttaccttgaattaccccacatgttagggagggacatggtgggaggtgattggatcatgggggcagtttccctcattcttttctcgtgatagtgagtgagttctcctgagatctgatggttaaaaagtgtggcactttctccttctctctctcctgccaccatgtaagatacgccttggttcccctttgccttctgccatgattttaaatttccagagaccttcccagccaagcggaactgtgagccaattaaaccacttttctttataaattacccagtctcaggcagctcttcatagcagtgtgaaaattgactaatacaggtgctttttgaaaatgcagtttcctggactccccacaggtttacagaatcagaatctctgggagtaaggcccagaaatttgcattttcatccatagccctagtggctctcatgcatactaatattgaggaccagtgtcctagaatatttggtgattatctttctctggcatttgtatcacacctatgttcatccatagccctagtgactcttgtgcatgctaatattgaggaccagtgtcctagaatatttggtgattatctttctctggttttcgtatcacaactatgttatgtgtatgaaatacctaactatccccacttgtgtgtttcaaaaggtccttttgcctacaggagcaggctaaatctcatgacattccccacactcaatcctcacccagaattcctgagctctggggaaggtgccatctccagcctggtttgcaagccagaaacacaggctctctcttacagggaaaatgaaaatacattttaaaaatgtgaataacccccaaaatatcaggtaaggcacataaaacaaaaataaggcggcgtcagtagaaaacacaagacaaaatgaaatgcagcgaatcactggaaatgttgagggaagtagcagttctgggtcaggggaggcagaaacagctacagcttgggagctgtggccagtgtgttctctgagaggtagctatgcagacccaagctaacagccaaccccagaaacctcagcctgattcagattcacctcagggtgaatctggtgactcagcctgagtgggagcagtttcactacccgactctctgtgtaatttaatcttgtgtttgcagccaatacctagccaatacagaaaattaatgtatgggaggaggccagctgctcttgacatggaaagttcagattattttcaagcttcaagaagggaaccagcgacagggataaatgaatgagtagagccacttaccagcaaaaagcgttggaattttttctataccactccagcccctcattgcagggctgctgtagagaactgatgtccccagttctgcccatctcaggtatactccaggaggctcgccggctgacagcttccttgctctgccgcctgtgtgaaggggctgccactctctgttctcaggtcttggtgactgatgatgggtccatttttccttttgttgatgttataagtgggactgttaattctatttttggattgttcatttcccaatctttttttttattattatactttaagttctagggtacatgtgcacaacatgcaggtttgttacatatgtatacatgtgccatgttggtgtgctgcacccattaactcgtaatttacattaggtatatctcctcatttcccagtcttttaagacataccaaataattttctctgtgagtgtgagcttacagaaaagagctctcgttgtctttctggcagcaacaccgttgataatgcattgctggcaatatctacttgtggttttctgtaaaaatgctgtgagtttaaggacatttacctaatagtctgactgggaaatcctagattttagtaattaaaaaaatacattgctttgcctctagcaaataagaacaatgtctctttgctgattcagatatattgaatctttccaaagcatttgctttagttaaagcaatttttgattagtattattctaattagaacaatttttaaatttttacagatgaggtttcactctgttgcacaggctagtctcgaaattctggccccaaggaatcctcctacctcagcctcctgggttgtggggattacatgtgcttgctactgaagcgggccaattagtatttttttaatggacaagttataattgtgtgcatttatttgatacaatgtgatgttctaattcatgtaacggagttctgggaaagtcataccaacctacagtggtacctttgtggaaagattaaatcaagctaattaacatacccattaccttgcttattatttttagttttaatagagccagtaaatcttttcacactcgaatttaacttatattaaattatttatattgtacaacttacacaagttaaattaattaacttgtttatcttatattaaattaggcaattataataactagtaaaaattttatatactggtttggcataaacttaattgattggagtaaaagtaggcaaggatttgattctaaaatgaagccttaaaatcttgagctttattttgactatttttttctcattatgtaaggtactttattatttatttttaaaataattttaagctttaattgagctaagcctattcagtaagtttttcagtatacctagagaataaaggttaattgaggctgcagttaggaagatttctctctttttaaatttttatattttgtagatattttgtaggtatgaggtgtcactatgttgcccaggctggtcttgaactcctggcctcaagtgatcattttacttctgcctctcaaagtgctaggattacaggtgtgagtcattgcaccaggccaagaagaattctcttaaaagtcaatttttttttctgattgaattggtggtttccagtcccttcttttttgttgttttttgtttgtttgtttgcttgcttgcttgatttttttagagacagaatttgtgctgtcacccaggctaaagtgcagtggtataatcatagctcactgcagcctcaaactcctgggcccaagggatcctcccacgtcagcctctcaagtagctgggactacatgcatgtgccatcaagcctggctaatttttttgtatttttagtagagacggggtttcaccatgttggccaggatggcctcgatctcttgacctcgtgatccacccaccttagcctcccaaagtggtgggattacaggtgtgagccaccgcgcccggactaccatctgttcatttttaaaatgaatcttgcttgggactacaggccccagaatggagatagcacttcttcctgcaggaaccagggaccacctcactctcttgacactacagagcctgccttccttagcccctgcttgttaggtgctcctaaatgcaacctttgtggccatacttagcatgcagtgtcctccctcaggctgtgagcatacgtggggctaataatctactgttgattttatccacccagaattaacgtcctgtgttttgccatccccacagccctagggtgggcatccttttcttataaacaaggtaaacaggaggcaattaaaacaataaaaaattttaaagagaagtttagtgttcataaatgtctttaacattaaaccaccgatagtctagaggcagcctttcaaacttctataaattggaatagactttggagatgaatcataacggctgaatagatgcaggtatgtttgtctcccccacagagaaaaccagaatagcaagtagatactcacatttcaaacaaatggtctaggagagaatgctgaggttcaccagagaagagatgggaagcaccagaagtaagaaaagggtttgaggcagcttgcccacctgggattgactgagctgggagaggctcctggaatgtgtggggaagcagtaagagagaaagcccctgggctccacactcctagacaggcttttataatcttggctgtgggagaaaccccggactcattagggcctccggcctgacatatgaagctgcccaaagatgttgctccagaaagggaacccccacacactcccacaggcatctgaaccctgggcagcctcagatgggcaccattttgagagcccagacatcaggtatctacagacagctgctgccactttactgctgcaaggaggcagaggggagaccaggcactcccatgcacccctgggagagttactgcctccctgctgaaggctgaagttgagacttacacgtgagcagactgcattccccatagcttcttgcccatgctgcttgcctgcgagggacctcagcctctctggttgcaggcccaaggtgcagtttccatagtttaagttcaggctgtgccctgcccttggcctcagtttgagttgacatggctgcagctgtggcccggtttaggagggacagggagtccagactcccttatacatactcaagataatactcaacaccctgctatgggatgatgcttttctgggagggatctctgttttgtctggtcacaagcccacagctggcaccattttgagagtttaacacttggctgtgccccgccctccaggtgagtttgaggtgatgagttccacaccctgctgggagaggaacagggtagactaagctctcttaccaaacagggtagtccaagctctccagggtacaccacacttaggacagtgaccactgcagtactacaagtgactgtgggactggggacaagcctgccaactgatcgcatcttcttgtaacaccaacatggagggcttgggtcccagtgagctgttctaccactgctactgctatctcccatgccacaccagctgcccagaggtctgagaacctgcccacacacagggatcatcgttcccactgcaagcttctaagccagacatctggaggcccaagaatcagcccctagaacctactgactggagccagggtatgctgctctggggcctaaaaacagtcattctcatcccactgctgctactactggggccaaagactggcttagttgacgtccaagttcccagttaaactttactacaacctcaactaatagctgtagcttaagccactgaggaaatcacagataccactgaccctgaatactgccaaagaagtcatgcaaagaccactctactgcaggtcaattgggataatttccctaaccccttcacaagacttgtgacagaggtgcctcactcgctcagcctgtagtgctcaattgctcaccagtgggtggggtggggtgggggtgcagcttgccggcaaggggatgcaggagcccgggtaggtgtgttttgggcactggcaggagcacaactgtgtactggccctgcagcagcatctgggggatgcccacaactcatgaagcctcagagggagtgttacagtcagtgctcttttggctctgccatccatgaatggcttaggtgttgaacagctcggtgtgacagccctctgtatcctgagctcctgctcagtgtccaggaagaatcaggttgcatgaacgaattgaagatggtaaatgtgggggattttattgccgatgaaagtggctctcagcgggaaggggagctggaaaggggatgaagcaggaaggcattcttcccctgaagtctggccatccccagctgggctcctctccaaagctatgtcattgagccatccctctgaagtcaagttgcttctctccgaagttcaactgtagtctccgatgtccagctgcttcgtctcttctccccttgtctgccgtctgccagtggagcctggggtttttatgggtacaggacgtgcctcctgttcctatcacagtgccccaaatcaaagtgtcttaacaacatatattctcaggaaaaaattatcccctacaaaagcaattttaacaaacttgactttaacagacttgactgctacaccagatgtgtagatatcaacagaaggacacagtcaccatgaaaaagcaggaagataggacaccacatgaaagatcataacaattttccagcaacagatcccaataacaaagaattcctcaaaatgccagataaagaattaaaaatattgatcttaaagaaaatgcaatgcaatagaaatctgaaaaccaatacagagatatcagaaattcagtttgggatatgaatgagaaatttaccaaggagatacagatattataaacttctataatttggttattgcatagcatgatgcatatagtaaaaaaatgtatatttcaaaactattaagagagtaaatttcaagtgttcttaccacagaaaaatgagaaatattgaaggtaatagatatgttaatttccttgagtttaattattccacattgaattcatcagtcatgctgtaccccataaatacaactataatttgtcaatttaaattaaaaaattaaaaaataaacttaagaagccttaggtttatttttaattcatatccaacttgtagccctttttaaaataatttatttgcatttcaagatacatatttgatggaacatgtacatttttcagcgcttagaaagttccaggcaccactatagtggtggctcactcctatagtcccagcactttgggaggtcaaggcaggcaaattgcttgagctcaggggtttgaatccaatctgggtaacataatgaaaacctgtctctaccaaaaaaaaaccaaaaaaccaaagttagccagatgtggtggcatgtgcatgtagtcccagctactcaggagaccgaggtaggacgatcacttgagcccaggaggttgaggctgcagctgcagtgaactgagatcatgccactgcactccagcctgggtgacaaagtgagatcctgtcttgaaaaaaaaaaaaaaagaagaagaaaagaaaatttctaagattttcctcccatcctacttactccaacactcatagcctgagcatcttcccaagatgcatctcaacagcccactgagaggagtagtattttctctcagctgtggagaaagaaaaattgaggaattatgagacaaagacaagaagagaggaaagatgtcagaattagccagagataaaacaacggtgtcgcacgtgacgactatctgaggttagtgtcacgtgagtagtaaaaagaattcaccaagacagttgtaaagaaaggcagattttttagaaaatgtaggtaaagaaaggcagattttttagaaaacgtagaaaaattgttgcaagaaagcaaaggcaaaacagcaagtgcggagctgactgcaaagagacaaaggcttgctggggattttataggttggtgcttgtgctggagagagctacttagagtactgataatggtaaggttgcagtgagctgatttgcatatttcttttttaatgaaatttaacttggcttttactgcatttttaaaatgtaaaaatgtaaaaacaaacacaacatagtatttcaatgctgtacctttatgcaaatgacttcatctatctttttaaaacatgctgtgatatagctaatgttaaaactgacacagcttcactttcttctttttctctgtactgaaagctgcagaaatacacctttaattccaagacaatttggttgaagccctcaaaataaaaagtgtacatccacttccattgccctgactttccccacattgttgattgtgattctctgtgccatgttggtagatcaggcaggctatatataatttgcacaaaacatctttagccagggtaaggttttagaaactatcttaaaaagaaacttgtcaaaatatttttgatatttaggacaaatactaaatattataattttctcccagcacatctgtttacacagcctagttagctagctgaccctgttaaagatcagcttatggaacaaataggtgaagtcatttcctgagccaaaagatacagataataaatgttaataatagcagcagactaaaaacattcctttttgttgtttgttttccatagtcaacagttttagcacaaggactttagaaaatgacagatttttttggtaaagtttactgcctgaaaagagtttaataaagaacatccaaggcctgattgctgttattctgaatataacttttaattactttctgtaagttacattcggttactgtcagacaacttactgttgcatggaaaaatgccccaaaaaactgcaatggtttacatacattttacattacacgtattacctcttaaaacccccaacagaataaagtcttagcaaacacaaattttaatttctgaacacccttccagtaagattgtaaaggtgggaggaaggggaggaaggacttgttttttgtattcctagtctacttgattaaaatgtaatcttccaagggtttgtttagctcactatccagactgctagggttatgatgaacattattacttctttccagggtaaaaaaaatgacatttgaaaataatgtaaatgctatgacatgattttcccaagcatgacctcaacttgaaacattagattacttaagaattctaaagattggtataccaccactgcaccagaatttttaattattccaacagctacaggaattttttaatagtttttttaattttatgaacttaaagctgaagaaaataaccgatttagaaaccataataaaaggacagatatttagccagagatatcagttcctcctgaaaaaggatactgacctcctctcactgcagtttttctccaggtatcttactgatttcagatagaatttaaaattcatcttaaaaatagaaacaaaaggactacttaaactgacattaactaataaaaatatgctcaaatttactgacagaatcatggacacttcatacaatacttagactctaccagttttaagtaaagtaaggaaaaaattataattacaaagccagtctttccccttggggaaacaaaaaagccacttttgaccaattgttccctgcatatacatatactgtatattattataagcttcttcagagaagcaaaacatctttgtcttcctgacactggattatttagcatgtttttttacatcaggaaggcaactgcactgcttgcatttttctaccagctgagtgtctggtgatagctgggtgcaagaagattgtgagttatttatgcaggaggactgtttgtcctcgaccatgaagaaaggcagacttatagcttatctgcttcttctttttgctttcccctgctgccaccagcctgactcttttgccgttagaactccacaaacaggagttcctcttcaagccctctgtatccctcatccctccctcattcctttagttaagagcaaggtagggacctttacctggtacagctccgggagatgggagataagtgacactgagacttcatacccagaaccctcaacttcacaagaaacttctgctgggggccaaaagactcgggacagcagagctcaaagcagggccagaaggtgcaggtggagccacagcggcgggtctcctttaaggataagatggcatcatcataacagcactgctctgaagggttgtagatcttgttcccacacctgggtgtcggctggcacagccacagtcctgagccaacaggagcgtctgggggcagacattgatggtgtacatccaaggaagaacagatactcaattcccagtctcttttcccaacaccacctcttccctcctcatttttccctgtcctgtccttacctgtagttccttttgaacactggaggaggaagactgttatccagcagacaagagctaagggagaaaggaaaaaggttgaacatggagctgagaatgtgacaagtatggaaaaaacaaacaaacaaacaaacagaggttagggtggtttaaaggtggagattatcacttggggctaagtctgtatgggatcccgttcaggcaggccctgagcagcacgctcagtcaccctttgaggtgactagtagggcacaggaggctggaataatgttagagataaagaggaataaatcgggttgaggtttgggagctgcactgggaatgagatgagatgatgtttggatttggggtcctacttgcccaagatgcagcatcgtggcctcatgcttccaaagatgctctaggagaattgaagaagagtggtaaaaggctggaacttatggagacagcctaaatggggttgtctgttaacctggtaagtttactgattggatggctgctgatcatgccacctgcagtctcccaagcacattccttgaagataaccaaagtctcccaagcacattcattagtttctttaaggaggagactgggtggcgtaagggaccacagagccgaatgttgcagactgactcattgcattctccatatactattgcagacctcagggtgaatgagtgtaggttggtcctactccaagttaggcttctaagagttttcaagctccgacattgaggagacagtgcccaactaagctccaatcagagagaatgcttcagccacttccccatctggtttcacatcctccccttcctaatacttgcttcttctatattccccaagcacgatgtctctggaaatgtcaaggggaccgtttatgaagccactttattttttgctctggagtcattagagttgccacctgctctagcagttgagccacggctctggaaactccaataaagggggtaggggtggagaatagcaatggcccaaatctcctggtgtgcttggtgtgaggattcagagacctccagcatcttagttacatggtcagggaaagtactaaacacctgcttttcataatcatattatattagtggccaatgataagtgatgtagtacttaggagtgtgtagtacttaggtgtgcagacagagggaagggcagggcaaactgaggcctgccaggcaagtgccagctagggaagggcttggacaaattcaaataatcccgaagctgtggaaaggacctcagtcttcatggatgtgtgatgattcaatcagaaaatgtctaaggattggccagactttccatcctccacttgctggcacagcatagggaagagttgctgacttaagttcatccagcctgtaccatagcctttgaaatggttctccttttctgagcttcattcttagcttcctgtacatgtgcggaggtgtggggtgtggtttggatgcacaaggctgctctcccctaccccggaacctaagaaggccaacaatgtgaagattcctagtgagcccaggctgtcagcttgtttactaccaaatgttaaaaagaaacgtttgagtttgattaggtaaaatacaaaggacaaataataatatctttaatatacaattatcattcttattccaaatgaaacttcagctttactattgggcattgggaagttaatgtgtacttaatttttcatcttacagaagtggcaaggggcagcttgaagggataatttttaatgcattttataatgataatcatttagagaaatccttatgttgtatctcattaacactaagatgttattgaaagatacactgttgttttgcaactctaagatgcaatctcatcacttagaatgtttattaacagagcttcttgcaacatgttgagacgtagacttttggaaggcgaatagaaaaataaaaatatatgggaaataaatctgttaaagatttcttaaaatgtctccacatttggagactgcctcctgtgaatcatctttcaaccccagattggttcctgtgctttcttacacaacatcattctcagttctaccaacagcattggtcatgcaaagtttggttttattctaagctgctgacacccatactgcaagttatcattgaactggtgacactagccccttctttctttgaattttctttcatctattcctagagattttgacaactccttctgcctttcattatgttgttttccttgtgctaggcaatccttctgtgcctgtctcagaaacaaaatgtgatactcttcatctctttatcttcttgtgccccataaagcacttggttgttgatctgcaagaaaatatgtacttgggttcattcctaaaacaatgagcatgtgcttcattaacagtaaatttacgtcatcgtcttctattaatgtgtcattctgcacacacaacacacaagccaaatcatggtgttttctgatatttaaaatgacagttacactcaacacatgaaacataagcaatccacacaacttaattgaagtgtcaagaatattaacctgaagacttagttcgtccctgtacaactggcagcagctatgtcactctgcttgtctgatagctattgcaagaccctattgatgatacgatgcatcactagttcaagggtatgggaatgtagaatatatatgtacatctctgagtggaggagagtcattccaatttgaaacttagtatatttatgaggatcagatgaagacacacttgaaaagctcccagcacagtagctggagtgtgtcaagcttttcgtattttctctcctcaactgtgctttcttaagaaagctgcaaaatagtctgggcacagtggctgacacctgtaatcctggcactttgggaggctgaggtgggagaacagcttaaagccaggagttcaagaccagcctgggcaacaaagcgagaccctgtctgtaccagaaaacaaaaataaaattagttgggcatggtggtacatgcctgcagtcccagctactcggaaggctgtggtgagctgtgatggcaccactgtaatccagcctgggtgactgagtgagatgctgttgcaaagaaagaagaaggaaggaaggagagaaagagaataagaaagaaagaacaaaatatacacatcttgttccatgaactattgacaatttaggtcataggcaatcattcttagtctaaattttcttgaaggaagaaataactttctgtctggcactaagtttcaacataatttaggtcccggacaatttttgctgatttaatgaaaattatcaatcctcccagaaaattgttcttaaacggatgtataggtagataggtaagatgtataggtaggtaggtaggtgggtagataggtaggtaggtagatagatagatgatggatggatgggtggttggatattagatagatgttagattgatagacaacagacagactgcatgcaatttctttttttttagagtcactaattttacttttttaaaatgttaaaaaatctacttttaattttttcgtaagttattggggtacaggtggtatttggttacttgagcaaaggagccactggccacagaagtttctggttggtgaagcgacaccccaaggatcccataacactttgggaagtatggccatttttaacaatattgattcttcctatccatgagcatggaatgttttcccacttttttgtgtcatctctgatttgtttgagcattattttgtagttctccttgtagagatctttcacctccctggttagctatattcctaggtattttactctttttgtggcaattgtgaatgggaattgcagtcctgatttggctttactgttgttggtgtatgggaatgctagtgatttttgtacattgtacaaaaaatgtacatttgtacattgattttatatcctgcaacttcgctgaagttgcttatcagctgaaggagcttttgtggagactgtagggttttctagatacaggatcatgtcatctgcaaacagggatagtttgatgtactctctttttatttagatgccctttatttctttctcttgcttgattgctctggccaggacttcctatactatgttgaataggagcagtgaaagagggcatccttatcttgtaccagttttcaaggtgaattcttccagcttttgcccattctgtataatgttggctgtgagtttgtcacagatggctcttgttattttgaagtatatttcttcaatacctagtttattgagagtttttaacatgaagaggtgttgaatttttctcaaaagccttttctgcatctactgagataattatgtggtttttgtctttagttctgtttctgcaatgaatcacatttattgatttgcatatgttgaaccaaccttgcatcccaggaataaagcctgcttgatcatggtggattagcttttcatgtgctgctggattcagtttgccgggatttcttgaggattttttgcattgatgttcatcaaggatattggcctgaagctttcttttcttgttgtgtgtctgccaggttttgatatcaggatgatgctggcctcatagaataagttagggaggagtccctccttctcaattttttggaatactttcagtaggaatggtaccagctcttctttgtacatctggtagaattcaactgtgaatccatctggtcttggaaattttttggttggtaggctatttattgctgattcaatttcagaacttgttattggtctattcagggaccgaatctcttcctggtccaatcttgggagtgtatatgtccaaaaatatatcagtttcttgtagattttctggtttatgtgcatagaggtgttgataatattctctgatggttattatttctgtggggttagtgataatatccccctttacatttctaatggtatttattcggatcttccctcttcttttttaatctagctagtgttctatctattttattaatttttttcaaaaaaccaactcttggatttgttgatcttttgtgtgtgtgtgtgtgtgtgtgtgtgtgtgtgtgtgtgtgtgtgtctctgtctccttcagttcagttttgattttgattatttcttgtcttctgccggctttggggtttgtttgctctgggttctctagttcttttagttgtgatgttaggttgtgaagctgagttctgactctctgaagtgggcaattagtactataaatttccctcttactcctgccttagctgtgttccagagattctggtatattgtatctttgttctcattggtttcaaatagcttcttgatttctgcctcaatttcattatttaccccaaagtcattcaggggcaggttattcaatttccatgtaattgtatggttttgagcaaattccttagtcttgatttctaatttgattgtgctatggtctgagagagtggttgttatgatttcggttcttttgtgtttgctgaggagtgtttcgtgtctgattatgtggtcgatttttcaatgtgtgccatgtggtggtgagaagaatgtatattctattgcttttgtgtggagagttctgcagatgtctatcaggcccatttgatccagtgctgagttcaggtcctgaatatctttgttaattttctgacctgatgatctgtctaatactgtcagtgaggtattgaagtttcccactattattgtatggatgtctagatctctttgaaggtctcaaagagcttgctctctgaatctgggtgctcttgtgttgggtgcatatgtatttaggatagttaggccttcttgttgaattgaaccctttactattacataatacccttctttgtctttttttatctttgttggtttaaagtcatctgagattaggattgcaactcctgcttttttctgttttccatttgcttggtagattttcctccatccctttattttgagcctgtgggtgtaattgcatgtgagatggactgcatgcagtttcaagggttcaggttcactgtttatttaaaccaaatactacagggtatgatctcctgaactaagtgggtgaagtacacgtttcctatgaaacagcctttttcattatctcacagggcaataacttctttagagttttgataaatattttagttcccccagcaagcatcagatgatgagttaaagaacataccatgttatttaaaatatggcatttgtttgtctacatgctgtttattgaggttcttggaagcaccttttcattatgtttataaactggttacttgcaagtggttgcttgccagtttaaactagcttaagctgtggcaaaaagaggaatttattatctttggtaggttccaaattaaaaaataaagtgagcaagaactaagattagaagaaatttatgagcttggatgaaggttcccagtatttctcattatttttatgtttaatgatgtatagttccttttctgtaaatgatacactattcagaataattgttttgggttgtttgcttccttcttattaatttataaatgctctttttatatgggagatactaaccttttgtctgttatatgttttcctcgcctttgtgtttgtttctcagtaatgctggtggagtcttcttttttgagatattttaaatttttatgcagcagtgtcttttaccactgccctacatcttctttccactttttggcttccgcttacgtaaggaggccatctccaacttaaagttctatgaatagttctatatttttactttctttttagtcatttttattcacatataactttttctataagatgtgatgctgagtctaagttaattttcttgctaatgaatgtcctattgaatctgaaattacttgttgactagtttcatcccttttcttctaatgtacaatgttacttttcttatatctcagttttccattattagctttatctgttgatggactctgttcaattgatttatgtgtaatttttctaggtagtgtctggttcatttacagtagctttgttttaaattttaataatagacaaaaacttctctccttattacactacattaagctttactcgacaatatttgtgcagtcagctttaagagctcccaagtaattttctaaaccctcctcctaaaaaatagcaaaatttaaaaatgggaattcagatgaaatttttttgtaaacattgtttggctttggaaagcatgagcattctaatgttttaatactttctgtctcagaggtttatcgacttctttttttattaggtctagtttgctgtcaacacccatttaattttacgtaaacatgctcttcgaggctgaagcgaatatgactgattttcagtgtgaaaataaaacataaaaaccccttcttggctcatgcctgtaatcgcagcactttgggtggctgaagcaggcagatcacttgaggccaggagtttaagaccagcctggctaatatggtgaaaccctgtctctactaaaaatacaaaagttagccgggcatggtggcctatgcttgtagtctcagctactcgggaggctgaagtgggagagtcgcttgaacccaggaggtggaggttgcagtgagccaatattatgctactgcactccagcctggggagcagagcgagactccctctcaaacaacaacaacaaaaacaaaactgttcttggagttgtttctaaacagaacttgtctctagtattaacgtagcagaaatgtatatgattttacattagtattaaagataagaatattcttggccaacaggaaatgggttaaagccttgcagaggagggaaacagtgaattttgtcattcacttaaccagttttcacacacacacagagaaagtccagaagcctggctggtaagaaattcttacccttttgctggcatgctacggttttgggttctctttttctgagcaactttggtgaccttgctccctgtggcatagctgtgggggccaagccacgttacaaaagaaaatgatccctttccatttcatggaaccataggcaaaagtctctcctttttacaagaggccaaccagtgggttgcatgggaaaataagatattgaattaaatgcacagaaagaaaacaattcattgggacataagtgacacaaactttggttccacgtgctgtcagttctctccttaaaaagccagcacccaaagttgatagactcacacacccaaacagacagatgacagaaaagtccacaggcttcccctcctcacatggtgtggcaaagagaaagtgaagtggtgaggggttttgaatagagttacaggattgagggccagtatgacagagaaggggagagagaaggagaggaagagggagggaaaacgatagagggagagagggagggagagggagaggaaagaagaagaaagggaaggagggagaaagggagggagagggagaggaaagaagaagaaagggaaggagggagaaagggagggagggatggatagaattgtttcttgggactggaacccaaaccaacttaggccagggaaaaggtacactctgtcccactgcctgctgagttgatcagatccaggtagtcaacgatttcaacctgtccctcacagatatctgttcacgtgacccaaaccactaaggattaggagaggagagacaaggcaccctaagtgacagaaaagttaggaagtgaaaaggagagaaagcaagaagggaagggagaaaagcattgcctgcaggagggatgggggaggcaaggagggctggcaggctggagaaagactcaaccagcttggcgacactgaatcagaagttcaggcagctgcttgtcagccgtgaagggatcttgtccagcagtcccatcagctcacaagtctccccctcagggagagaaaggctccccacatcccattgttgggaatgggtgctcggtgtcacaaaaatcaacactgagacaaaggatctctcagcaaggctagtttactttctgcagaaagagggccgcttgctagcagtcttgccatgagagcacacacgaacaaaggagacagggtcatttataacctgatatgccaccctactgctgtgtctggcttccgttggctggaatgggacctcacattctgtacttgacctgattggctagcaacttagaacttccccaaagaggcaaaggcagaggagaacaaaggaagacaggaagtaacttgtggaatgctgagagaggcaaaagcacttccaaataaggaagaggaataggctatgacctaatgcttgcttgggcctgttcaggcatgccagggcaaatatctaggctaaaatgcggtagctaagaacgcagagtatattgatttctttattatggctagcagatatttaagaatattagcacaggtctttgagtaaattttgcttctaagagaggttactatctattctcaattagactgggaggaaagtccctctgaagaggaacctctacttattttattttctacaccatgatcccaggcaagcccctaaataatacattactggtcttgggttcttgggctctcaatgcaatagaaactgacatgaggtcaaaatagttttcccagacaaaacttcattggagattattcctggaaataagagaggcagcacaaaagagaaagaattccctgatgactccctgaaaagagctggtagggctttttttattaggcaaagtgtgggaattgacatcaggggtagggtatgcaggctgggctgggcaaagcaggagaggtatacggtatgcaggtcagcagtatctgcttaggatggttttcttgaggaagagaccacctggtggtctggcctgtggcagcaaggctgtgaatcagttgttcaacattctttctggaatcttggttgtctcctaagaccagttcttgggattctttaagtaaaaggactattagcaatgaggtagtggcgtgggttttgtgatcagcaggaatgttgtagtacagcagtccctaacctttttggctccagggactggtttcccaaggaagacagtttttccatggacaaaggaggagggggatagtttcaggatgattcaagcacattacattaattgtggactttatgtctattattgttacattgtaatatataatgaaataatatacattatatattacatatgcaactcaccatactgtagaatcagtgggagccctgagcttgttcttctgcagctagatggtctcatctgggagtgacaggagacagtgacagatcatcagacattagattctcatattagataaggagtattagattagataaggagtgtgcaacctaaatacttcacatgcacagttcacaatagggttcatgctcttatgagaatctaatgctcctactgatctgacaggaggctatgcttaggcaataaggtgagtgatggggagcagctgtaaatacagatgaagctccacccactaagtcactgcttactgcctgctatgcagcccagttcctaaaagcagacacactggtaccagtccatggcctgtgggttggggacccctgctctagtaggggtgagatgaagccaagccctgactcttctctgtctcaaggagagccctaggtgcataatactgagaagaggagcagctctgtaattgcagttttaggcacaaggaagcatcattgggcatcctgattatctctttaatgaatattcactgtcactatcttgataatatctgtaggtatcatttacaaaattttcttaactactatcttgaaataattttaaacttacaaaaaagttgtacagttggtttctttctttcacacagattctcataatgttaacatcttaaatgatcttaatacaattattgaaagcaagaaatgaatattgactaacactattaatgaatctacaggctttattttaattttatcagttgtcccctcatgtccacttcctgctccaggatccaatccagaatcccacattgcttttgatgatcatgtctcctttgtgccctcccaactgggatagtgctttgtgttttcttagagtctgtatttctctatttggtatccattaactacagggtttaactcatggtcagagttgtttgcatctcccccgagagccagaacccctgctctgaaccatccgaaccatcccctttagtgtaggggagagaagagggttagataaaaggtttcagtcacttcctacaggaacctcactgaagtaggacacaagttcgtgagacctttgatctgaggtccttcagtgagggaggtaggacctcactgatgcaagaaacatgctggaggaatagcaagttgacctccattccagtcttctgtggctgtgtagatctagaactaatttccacctcaaagggaagactttcctggacaggcttgcagccctgagtggaaacatcccactgcctttgactcctgactccgtatctcttttccagtaacagttgtgtaaatgtttattagctgacaattatctaacaattcttggcttccagacttcacccatgtcaacatttttcaaagtgtggcagcaaacactttcttttctttaaggattctgaatacaggccctcagtcttttctggcttgtagggtttctgttgaaaggtccactgttagcctaatgggattccctttccaggagaccttcccctactttctagctgcatttaatattttttctttatattgaccttggagaatctgatgactgtgtcttggggatggtcctcatgtatagtatctcagaggagttatctgaatttcccagatttggatgtcaacctctctagcaaagttggggaaagtttcatggacagcatcctcaaatgtgttttccaggttgcttgccctctctccctctccttcagggatgccaatatgtggtaggtttggtctctttatatagtcccagatttcttggtggtttcattctttttttaagaaaatattatgtcatgaaaaaactcatcaattaactagattcatacttgtttgaacaagaattgaaaatctattaaataggcagaatgtgggcatcttgttccacatgggaatgaaaagatgctataggttctttaagaattgcacagtgtaaaaaaataacaagaaaggagaaggaaaggggaaaaaatcacatgatattgggagccatctcacattatgaataatctaccaataaacatgtaaaaaataatactctttgtttctgcagtagctttgagtttatagttcttggaatgactgtattccattgaagacatctcagtaacaggaggctgttttagcaatcccatgtgcagatattaataaaaaaatatataaaataatgcaattcatctcttgccatcaccccagaaatcatgacatttctgagaactgttttgcttgaaaatgggttaagctgtaagtttcggctgaagctctgtctctccaacccgtttgagtgcaacattcactagaagctgaaatccactaaagtcctggttgagatccattggagtagggggaggagtgttgaaaagactactctgtgtattggtacttggtctagatttacacatgtcctctgggcacatgagagaggtgtctgtaaagttgttggctgctacctgctgtatatctgtgttttgtcccacaccaactgactggcagagaaagggacatctttcaatgcagtcacagtggcatggcagatcactgatggacgagccaaaactgatcctggggaagacggcttaggagacaatggcctccctagggttgggtttggcccagatgtacaggaatgaaatggggtctcctctagagctggcatgaagtttttgatgcccatcacaaacttcacagagcttgtttcagaaatcttgggcccacggcaggtaattgtgaactgatttggatctttgccatcctttctcagcatgtcaggatgcgtacaccacatgcaatattatctccttcgtaggctcatttatctgagaagcttgtggcgggcgttgatgaaccagttacagacctgtagtgtagacagatatgtttgctgggacaacagtgctttttcttgctcggaaggatggacattgtaatggtgctcatacagccaatcttgaagaatctgcacagactccttgggcaggttgccccttctccttctcttgcctgagccagaggatgaaggaaggtccaagggaatgtccatggaatcgtcatcctccgtctcactgccagatgctgcaacaatacctttcattgtttccatgagtcagtgcagaggagcaggaccctgcgtgacccaggatggggacacctatgcggccagtgtggcccagccttggtccccggcttcagggagagggttttcttcattttaaaaaatgcttttttaaatttttgtctgactgagttgattcaaagaaccagtctttgagctctgagatcctttcctcagcttggtctattctgttgtgaatacttctgattatattatgaagttcttgtagtcagtttttcacctctgtgagatctatttggtcctttcttaaaatggctgtttactctttaagctcttgaatcattttagtagattctttagataacttggattgagttttgactttctacttaaatcttgactatcttcattgccatgcagcttctgaattctgtctgttatttcagccatttcggtctggttaagaaccattgctgggaagctagtgcagtcatttggcggtgagaagacactctggcttttagagttgccagagttcttgtgctggttttttctcatctgtgtgggctgaagttgctttaatctttgaagttgctgtcctttggatggggcttttgggttttacattctttgatgcccttgagggtttaactatggtataagttgggtttagtcaactggtttcatttctggatgatttcatggggccaaggctcagctcagcacttctgggctgcatcgtctaaccctggggagctggtaccaggcccatggctttgtcccctggatcttcagggttaaacacctactgcactagaggggctaaggtgttccccatttgctagcaacaacactccaacgtggggtgttgacaaaagtgcttcatctgggtcacagcagtgggatcttcactcacacatgtgctggtggtgggggagcattgatgtctgtgtgcatgtgcatgctggcaaagtgttgaggggaggctgtgggtgagtgcttgctggcaaagtggtgagaggaggctttggctgggtgcatcctggtgggacctgtctgcaaaggctctctgatagttggacagggtctactggtgaaagggctaaggcagtggcccctgggaagcaccttagtttggcaactgaggctttgctgcaaacagatgtggcgggtagggaacttgggagaggccagcacactgagaggcactcgtatcagactggccccatctcctaggcaagatagtcctattctgtccaggtctgacagtcaagaaaggccaaagccacctagaggagcaaggtgagccttggagaatgagcatccctgtccatgctccactgcagctgtttccaaaccagactctctgggctctacacaggctagagtcctgtccctgccaactctccaagcagctctctctgccagcgcaaatgtccatgggggctgtgggaccttttgcagctaggattctggaggtctctggcaagagtgggccactccatgcctatttaactccccacttccccaggagctgttcagggccaggaacaagtcctcatgctcagcaaccctgtgcagggtttccagcttcctccccttgcagctgagggcctgcctccctcactccactctcaatgccttcctttcgaagatctgcttggtgtatgctggtcttcttgatggtcagtcccttggtgggagaagctcttcctggctgcatctagttggccatctcagctcctctccccaatcaaaaccaattttttttttttaaaaacgaaatcattcaaattgaattctaagattttaaggctgaatttaagaaagaacctctatgcacatgtaagaaatctatgttacatatgaggttccagaaatgttaaaaattagtatgtagaaaagatacatcatgcaaacactagcaaaagaaaattactgtagctaagtgaataccaaggtaggctttaatgcaaaagataaagctagagataaagcaggacaagtaataatgacacagggatcaatccaaatggaacatataataattatgaatctgaatatacctaattacttagcttgaaaaaagtaactaaaataaaagtggaaataagcaagttcacaactgtggtgaaagactttaatacactttttgggatagcttatgtaataaggagaacaaaaaatcagaatgggctaaaaatttgaacaatacaactaacacacataaccaaacttatatgtgtatatgtctatatatatttatatgtgtgtatgtatttatatgtgtgtatatatttatatgtgtatatgtatatatgtatatatagtatgagatacacatatatttcacgcactcacacacacacacacacatatatattttgagacggagtttcattcttgttgcccaggctggagtgcagtgacatgatctcagctcattgcaacctccacctcctgggttcaaacgattctcctgcctcagcctcctgagtagctgggattacaggtgtgcaccaccatgctgggccaatttttgtatttttggtagagacggggtttcaccacgttggccaggttggtcttgaactgacctcaggtgatccacacacctcagcctccgaagtgctggaattacaagcatgagccaccacgcccagcctatatatatatatatatatatatctcaaaatggtagaacttacatgtttttcaagtctacatagaacatttatgctaaattgatcatatgttaggtcataaagaaagtctcagcttccagaggatgaacgttattaaaagtaggtttttgagctgggcacagcggcacatgcctgtaatcccaaatactcaggaggctaaggtgggaggatcacttgagccaaagagttcaagtctaacgtaggcaacatagcgagacctcatctctgaagaaaatgttctctgggactcccagtttctagtcaagcatgtaagaggcttggaactcatcgctccatcttaacagaaaaaatactgaacaaagtaaaaaattaacaactcttagataagtgggatcacagagcaaactactaccctacgatttgttgacaggcagttggatacagagaatcaaaactactgcaacagaaacccatgaccagaaacccctgtgggaaccagtaccaggacaggaaaacatgaagtctaatgaatgaattcctggaggctcagggtggagcagtctgagagttaaaaactccagggggcccagtctaaggggagcctctgcacttttctaagagttttacctccaggaaccctatcaggttctcacagtgaatatgggagaaaaatctccttcatggtctggcatgaagtgggaagggggaaagtaaccgctgtgaaacacaccagagtattctgttcttcttaacaagctctgccattaagagaaagcattttaccagaatctaaattattagggttttatcagagcctaagtgacctggaggaagagagtattatttttatacaggacagtaaacaagtattctttgctctaaagggaaaccttacctctatcttccaaggcagttcactacacaaacatccttgaaaagagtgtggaacaaaagaacagtcaatgcctcactgccaggccagcaaaaatgcaagagatccatgggaaattgtctctgacaccaacaaaccaatatttttgcaaagtaaataaacacatgagcaaggtgataatagtgtgccggaaaacgctgccctgctgcagtggtgactgtgatagtcccgggtgtctgggaagacacgccaggatcacagagtggggcctggttttagaagaatgcaaatctggtcatgagtttcactgcttaaaattattgaacgactccccaccatgtctaggatggaacccaggctcccagctcatcccacaaggcccttcactacctgggcctgcctttccctctagcaccttctccacctacacccatggtggccctctgtcatccagctgaacagccactcctagaaacacccaaaacaggcttcaacaacatgactcacctaccagcacctgcttgaagccctcctcacagtaactcttagttcccttcagggtttctccttctccccatcttcccaccctgcttccaacttccctcactgatagagaattaagcactcactctatgcatcccacaggactcatgcttacctctgtcactgtcttgccattggtcagtctcctgggtatttgcccaacccgaattcaccctaaattatcaaagatatgcatgcaaagaacaaaacttctgtttttgaaagttacaaataaagtatccttctcctccttttacctcacccctcccttgctcatttgctctcctcagagatcagtgctgttagcagattctggcttcagtacctttgaagtttccaataatactctcataattctctctcatgactttagggacccaggtacaccattaccagttgtggaattctaaaaatttacttaacctctctgagctacagtttcctctttaagcacaatgaaataatgacttacaagcatccaataacataaatgtgtgtataaagttcatgtaaactgggaccccacacacaccccttatcatgccaagtgaatccatcttgggaagtatgttggatggaaaattttcagaatgtagaaacttgcattctattattttaagtgacaaaaataataatgttcctagcccagttaataccaccaggtaatttcctcaaacattacaaaaatactcttaaaaagctttctagcagtctatccagggtttctacgtgaaatatagcattgagaagagttattctttgttaacatttactcactggtgagtatgggtatctgaagtaagaaatacgttgcgtaatatctgaatcaaattatctattccttctgcaatgaaaaaacaatgcactgtgatgtaatataaatatacaagtatgttatctatctatgtttaaattattatatgaaagagactatttaaattggactttagtaggcagcacgactggtggctgacagatattattactgggacccatgctgggtgaaaccctctggaaaatggtagggaagatgagagatactgctctgtatgtacagacaagcccagagagctgctgacattggctaattgcactctgcatccttttgcgtgtacttctgccaatttaaaagcttccactggcttctacatgcacattataacagcttttgatacagataatctcatttagcttatcactgtcaagccttcacagcaaatattgttatagtgtaagtttatatagtgaagaatacctgtacattacaaaatgagagaaaatttcatttaactcctataaatgcactggctctgtgaggttgctgggtggaaatgcaggggttgactgttacatgttactgcaattgatgtttgaacaacacaggcttgaactatgcaggtccatttgtattttcttccacctctgccacccctgagacagcaagaccaatgcttcttcttcctcatcaccctcatcagtgtgaagacaaggatgaagacctttatgatgatccacttccactgaacacatagtaaatatattttctctttctcgtgattcttaataacgtgttcttttctctattttactttattgtaagaatgtagtgtataacacatagaatatacaaactatgtattaatttactgtttatgttatcagtaaggctgcccatcaacagtaggctatttgtagttacgttttttgttttcttcttcttctttttttttttttttgagacaagagtctcactctgttacctaggatggagtgcagtggtgcaatcatggctcgctccagccttgaattcctgggctcaagcaatcctcctgcttcagcctcccaaagtactgggactataggtgtgagccaccaggcccagccagtagttacattttcaggaaatcaaaaattacatgcagattttcaactgcccaagggtgtcagcaccccaatccacacattgttcaagagtcaactgtattatcagatggtattgttggtaataacaatagctcacatttataaaccccttcccatttgccaggcactatagatattgtctctgctcaaaccccctccaagggcttccctgtggctcagagaaaatcaagattgtgcacagtggcctactgagctatataaacaggcccttggtctactgtgacccatcacttgccacttcacattccctcactcagacccaacacgtggcctctgttatttgttgaatgccccatgcaggcaaccccaactggggctacagccttaggggattcttccagtaacctgtgggcccacctctcacctctgtcaggcctctgctcagaaaataactcatcacagaggccttccctgaccaccttcacttagcattgtttacagcagcggttggcatactttttatgtaaagagtcaggctttgcaaaacataagtctcttctgcaaccactcagttctgccattgtagtgaagaagcatgaagacaatacatgaatgaatgagtgaatatggctgtgttccagtaaaaccttatttatggatactgaaatgccaacttcatataattcatataatttcatatattttaaatgtgtcatgaaatgttactcctcttttgatctttttgaccattgatacaacacaattattcttagcttctggcagtcgaccctcaagtcatgacttgctgatacctgtccacgtaattctctatctcctaaactcctttgttattttttccatggcatacatcattggttgatatcgtatcatatcgtatcatatcataccatatctcatatcatatcatatcaaatatacttactcgatgtttattttctgtgtcttctaaacaaaattaaaccccttattttgctcactgctatattctttgcagctagaacagcacttagtataaaatatgtattcaaaattatttctgaataaataagtgaatacaaaggtcagtttccacaccctgattttattttatttaaaaacatacagtaagttgactgttttctatgcacaacttaatggatttaaacacaggtatagattcatgtagtcacgatcaaaatcaggttacagaacagttccatcaccccaaacccaaccccaacccctggcattcactctttcctatagttttgcctttcctgagtgtcacaggaaaggctaagttgattcttacctatgtaattgttgagaccaacttcttgtatctgacacggtgcctttgagatcttgccaagtcatggtgtatgtaaatagttccttgtctttttattgctcaaaagtttccattgtgtgtgtgtaccacggtgtgtctcccatttcccctgttgatagatatttgagttgtttccacttttttgctattacaagtaaaatactatgaacgattgtgcttttttggtgggaacataagtttcatttctctgggataaatacacaggagtgtgaatgatgggttgtatggtaaatgtataattttataaaaacagccaaaatgtttttcggggttatatatatataccattttcatttccatcagtaaaatatgagaaattcagtgtctttacttgcttgttagcacttggtattgtcgatattctctctctctctctttcatatatgtttgtgtataatttcataatatctaaatacacatactccggcactttttcacttacacccccagtggccctccctcgtccagtccaacacagtcaatccttgcaacaccccaaacaggtttccacacgtgacttacctaccagtgagtgacccactcaccagattaaagccctccttccagtaactcttagttcctttcagggtttcttctctccaccttcccatcttgcttccagcttccctcactggtagagaattaaggacacactcatatatatgtgtgtgtgtgtgtgtgtgtgtgtgtgtgtgtgtatttatttatttatttatttaatatatatatttaaattttgccaattctagtagatgggagatagtatctcactggttttaatttgtagttccagtatggctaatggtgttgaacaacttttcatgtgcttatttgctatctgtatgtcctcttttgtaaagcatctgttcagatattttgccgatgcttaatgattttgtttgttgtttcactttgagttttgagagtttttcatatactctggattcaagtcctatgttagagatgtgattcacagacactttctgcagttggtagcctgtctgttgcttcacttaacaatttgttcatcaagtttaactttaaaattttgataagtccaatctgtttttaaaaaatggataatgcttttgatgtcttttcccagatataaatgttttctctgatgccttctccttgaaatacgtagttttacttttcatatctagaccatttggagttaacttttgtatagagtgtgagctttggtagaagtcttctttttttttttcatatgcatgcccattgtctcacaccatttgttgaaatgactatcttttcccccattgaattgcctttacatctttgccaaaagacaatttactatatttgtttgggtttatttctggaacctattctgttcctttgatctatgtgtctatccatgtctatccatttgccaatactacactgttgtcattactgtagcttgagtaattgtgaaattggatagtgtgagtcctctaccatctttcctcatccaaaattgtgttggccattctagtttccattgcttttctatataaattctagagttattttgtttctctctcagacaaatcctgcttgggtttgattggaattgtgttaaatctgtagataatttggaaagaattggcatcttacctaaattacagattccaaaccacgacatgatataccactctgtatttaaggtttccttgaatactttaatcgtacacatcctttatatgttctcctagatttacagtataccagttcagtttttggggaggggggtattgtaaatggcattttttttctttaaattattgtatccactagttcttgccagtataaaggaatacaattgacttctgtgtgtttcatacgctacaacctttctaaattcacttatcaggtccagaactcttctactaacaatgcacttttataaagccctaacacctctcctgatctctgtctcaccctcccacctatctcactgtgggatgggaaggaagtcaatggaaaacacaggagcgcattctaataatagcccacatggtatccagtgacacaaataatagtgatggtgacaataaaataacagtaagaaacacagaaggagcgtttccttggacaaagcactccagaaacaacaacaaaaaggggctgcctttccatctattctatgaatcccagatgtctattttatcactgtctgttccttttctgttctccctggcagggtttttacagcccctgctctttttctagattatgctgcatcttcacagtttcccctaaatgactctgaagaattatagacagtgctgtctacaattataataatggatatggtggtccatttccaagacaaagtacctcagataggctgaggcccacaaactatggaaggacagaatatactaggcccatagctggtgcatgcttgtcggggtccccttagttaccctctcccaaaccagagtttagtctagaatgaaagtttactagccagcaaaatagctcactttatctattcttatcagcttgcctgactgcctaggtcataagtcaaatacttgaaaagccctcgagctggctttgattgcaatgtattataggctgcaacaaaatgcagtgagacaatcctaaagaaaacacctaaaagcctcaacccagcaaccaataggcgacgtctgggaagatcgtgaccccatcgtacttagcctacgaggaaccaggggagagacttgtgcactaggggataaatagcttgttgtaaccgtactgggtgtgcctgcctaccagacattcaatcttgcaagaccatcattaaaagtcttgcttccactgttttctgtgtctctgagtccattctttgggtttggacgggtgcgtttgtttctcatagtgcaggtctggagccggactgagatggggagtagagggaccccttgaaacttcagggtggatgaatatgaagtttcatcaccagctgtgatgtttggtgagtagtatgctctcagataagtgagagccaaggaatctctttcaagtctctttgccgtgggcagagttcaaagaatgacactcactcacggctttgaaaggttctagggaagcctttactctgagatttcgagaggtctgagaaggtagcagtcacttggaacaggtccaggaacatcttactaagctgttgatgcagttttttcttatgctttctgtggcttctcatgccccaccctttccaagaggccagtgcttctgggcacctccctaaatgtggataagttcatagcctacataagtccctgtataaagtcactgacccatttgcactgctgctgtcccatcagctgctctgaagctccatggtgcccagaatcttcggtaaggtaacccttgccccaggttgagctaatgcctactgttatccctaatgtacctctgaacctcaaacttaattctctcttccctatttaattcttggtttcccacctcataatcacccgtgtcctctctgactgcattgcaatctctcttccccacctgcaaattccagaagcttaaccctttccagagccctccctgcatttcctcacctgccaagcccaatgcccagaacctgcacacagagtcagtcccaaaatctgctctgagctgttacagcaaccaaagaaactcagagacatcatcttgtgccccatgatcatgatctggtgaccccagaatcactgtcattcttctctcagctgatctttatttttgaactcctgggctcagactcagaagggaccataggtgagaatgggtgtggtgagtggagggagaagaaaggagggaggattatagcactgtggatagggttgggggctcccagaggtcccctgccagctcatcagctctgactcttccagatattggactgtggttgtgccagttgacactcaggagtggagactagatctgcaatctgttgggactgtgatgaggggatcatcctgccctcgaaccagacccagccctgtagcccaggcactattgcctggagttcctgggctctcagcgccaggaaatcatgaggttcagtgtctcaggcatgaggaccgactaccccaggagtgtgctgggtaagtaagggcagcccaggcagtggactgagttttgttgtgtgtattccatcaagatgagcaatgcctgctgtgttcactaacttctttttgggcaaccatctctctctctccctctctctcttctctctctctctcttctctctctctttctctctccctctctttctctctccctctcttttctctctctcccttttctctctctctctctttctctttcccactcacccctcaccctttccacctctccccctcttcccctctccccctccccctcccctccccatctccctgtgtccctctgtctcacatccccctctcttctcttcccctctcccctccctgtcttttccctcctctccttccttctcttccttcctctctcaagttgaaggaagagtagctcagtcatcttccagaattgctttttacctccgagtcacctggctccatagcccccgaccaccgcatgcccatttagctgttcctctctttcccctctaccctcacccttggcaaccaccagtcagctttctgtctctatggatttacctatctgggacatttcatataaatggaatcacaccatttataagtgacctttcgtgtaactttttttttaacttaatgttttcaaggcatatccccattatagaatttattagtacttcattcctttttacaactgaataaattcaattgtatccatgtatcagcattcatttatccattcatctgttgatggacacttgggctgtttccaccatttggctattgtgaatagtgctgttacaaacatatgtatacatgtatttgcttgagaacctgttttcagttatcttgggtgtacacataggagtggaattgctacgccacatggtaattctgtttaactttttgaggaattggcaaactgttttccacagagctgcatcaattacattcccaccagcagtgtatgagggctcacatttctctccagattcttcaacctttgttattttctattttcctgtttattacagtcatctgggtgggtgggtgtgatatcctgtgtagttttaatttgcgtttccttggtaaataacaatgctgagtgtcttttccatgtgcttattggccatttgtattcctttttgagaaaaggtttattcagatttttccatgtttaaattgggttatttattttattattatttagttgtaagagttttagaagatatgctggatactcatcccttatcatatatataatttgcaaatactttcctcattatgtggattgtgttcatttccttgatgctattgcttgcagtgcataggtttttaatttttgatgaagtctattctttcttttctctcttgtgcttttggtgtaatatctaagaaaatattacctaactcgaggtcattaagacttacttgtatgttttctgctaggaatctttttaagaagttgacaaagaataattgtgtatatttatggggtaaaatatgatgatttaatgtatgtttgccttgttaaatgataaatcaaattaattaccatatctaccacctaatatacttattactttttgtcactagaacatttaaaatatactcttcagcaattttgaaatatacaacacaccatttgtttttttaagaggcagggtctcactctgatgcccagtctggagtgcagtggtgtgatcacagctcactgcaccctctacctctgaggctcaagtgatccttccacctcagctcccaagtagctgagaccacaggcacgcaccaccacaccatgctaattttgtttttcatagagacgatgtctcactgtgttgcccaggccggtctccaacttgtaggctcaagcaaccctcctccttggcctcccaaagtgctgggattgcaggtatgagccatcacgtccagcccacaatacactattatttattatagtcaccgtgccctgcagtggatctctaaaacctatctttcctgtctaactgtaacttcatatcatttgcttatctccctgttgcccatctgcccacaccaatcctctggtaactgcccttctctctacttctatgagttcaactcttttagattctacatacaagtgagatggtgtggtatttgtctttctgtgggttgcttattttacatttctgctaagagttttatatgttcgctcttgtatttaggtctgtgatacattttgagttaatccttgtgtatggtatgaggaagagatcctctttctgcccactcttttgtgtatgaatatacagttttcccagcaccatttgttgaaaaatcatttgttcccttacttcatagtcctagcacttttgttgaaatttgatttcaacaaatctaagggtttattttctgactgttagttttattcattgatctatatgtctatcctgtgtgtcagctcctacactgtcactatagctttgtggtaagctttgaaatcatgaagtatcaattctacaattttgttctttttcaagatcgttttagttattctcggtcctttatgtttcaatatgagttttaggatcaactgattaatttcttcagagaaggctgggtcctgtggctcatgcctgtaatcccagcacttttggaggccaaggaaggtggatggcttgatctcaggcgttaagagaccagcctgggccatatggtgagaccacatctctaccaaaaaatgcaaaaaattagccaggcatgcggtgtgcgtctgtagtcccagctacttgggaggctgaggtgggaggatcacttaagcctgtgaggcggaggttgcagtgagtcatgatcacgccactgcactccagcctgggtgacagagtgacacttgatctcacaaaagttctttgatatggattgcattgattctatagatcaatttgggatttttggcacctgaacaatattaagtcttccaatttgcgaacatggatgtatttccatttatttacatattcttaattcttttcaacaatgttttgttgtttttaatgcacaaatcttgcacctcttctgttcaatttattcataagtattttattctctttggtacgtggaattatattcctaatttcatatttagatggttttttactagtgtatacaattgctttttatatgttgatctcttttatcttacaatcctgttgaatttttctattagtctttaggtcatagtagcttccttaggtttttttttttttttctttttcttttttgagacagaatctcactctatcatgcagggtggcgtgcagtggtgtgatcatagctcaatgcagcttcgaactcctgggctcaagtaatcctcctgcctcagcttcctgagcagctagaactacaggcatgtgccaccatccctggctaatttttttatgtttttatttttatacagatggggtctcgctatgttgaccaagctggtttcaaacttctgacctcaagtgatcctccccacttggtctcccaaaatgctgggattacaggagtgagccactgtgcctagtccttaggatttttaacatacaaaatcatgtcatttgcaaatagaaatcattttactttatctttctcagtctaaattcattttatcttcttgcctaactttcatggcttgaaccgccaatgctatcttgaatagagtggtaagagtggatatacttgtcttgtccctgatattagggggaaagtattcaatctttcacaattaagtatgatgttagctatgagtttattgtagatgctctttaacaggttgaggaaactctcttctattcctagtttgttctttgtattttatcatgaaagagtgtagattttgtcaaatgctctttcagtatcatttgagagaattacgtgtctccctcctatagtctagtaaggtggtgtattatattaattgattttcatatgttgaaccaactttgcatccgtgggataaatccacttggtcatggcgtatcgttctttatatatgctgctggatttggtttgctatgttttgttgaggatttttgaacttatattcataagagatgttggtctgtagttttttttccttgtgatgtctttgtctggtttcggtatcagggtaatacaggcctcagaatagactggaaagttgtgtttggtttttttgaaaagtttgtgaatgattggtattaagccttctttaattgttttgtaaaattcaccatctgggtctggatgggcatttcccgtgtatgggtattcccctttctctgcatccttgccagcatctgttatttcttgtctttttgataaaagccattttaactgagatgaggtatcttattgtggttttgatttgcatttccctaatgtaagtaatgttgaacattttttcatatacttttttcatatacttgagtgtttgtatgtcttcttttgagaactaggtattcagatcttttgccccttttaaaatcagattctttatttttcccagcaatacaattatgtacatattgttttatgccattacttttaagaccagttaagagaagaaaggataagaaataagcaattatactgttttaataagtagttacaagttatataattgcttatataattacacaattctattttattagtgctctccagagggtgcagccttgggcatgagtgctggatcgctaactactccagataattatggttttagctgggttctttttttggggtagcttttgcctttttattacaaattatatatgtgtatatatatatatatatatatattttttttactttaagttctgggattcatgtgctgaacatgcaggtttgttacatgtgccatggtggtttgtttcacctatcaacccgtcatctaggttttaagccccgcatgcattaggtatttgtcctaatgtgctgcttcccttttcccccaagaccctgacaggcccctgggtgtgatgttcccctccctgtgtccatgtgttctcacagttcaactctcacttctgagtgagaacatgtgttgtttggttttctgttcctgtgttagtttgctgaggatgatggtttccagcttcatccatgtccctgcaaaggacaggaactcattctttttttactattttttcctgatgtttctgttaagcttctggcccgtctgcctctgttggtatcacttgcatctgttagactcctctaattgttaattgattgctcttttctttttaataggcctgtgggctgcttaatgtctaacccttttgccaagacaaagtgttgccagggtttgaggctgtctctgaccccaggaggagggcccttcttagttatctctttttctgattttctctgttaagcttctgcctggatttttgggttttgttttgttttgttttgtttttgacggagtctcgctctgtcgcccaggctggagtgcagtggcgcgatctcagctcactgcaagctctgcctcctgggttcacgccattctcctgcctcagcctcccaagtagctggaactacaggcacccaccaccacgcctggctaatttttttgtattttttttttagtagagacggggtttcactgtgcttgccaggatggtctggatctcctgacctcgtcatctgcccgcctcagcctcccaaagtgctgggattacaggcgtgagccactgcgcccagctggtctttttgtttcttgttactactgtcatggaattaccaccctcttcttggttttttagcaccagaatttcagatatttttgtacggtgttcttaggcatgaacttctccacactcttttcaagaaaagccagttttagggagacttgtggagctctctgttctgatggcctccctctcccccgggcagaaccgctgagccactggactggagctggtgtcagggacagcagctagcttctcctgcagcgatgtctttcctctacagctagaacactgggagggggtggtagctgctcctcttctcggtttgccctttcttgtgtggaacctctgccccatgagtgaactcaggcaggatcagtgaagcccagtgtgcttcacctgctaaacttggcatggaacttccatgctaggaggaggggctggatgggagaaggagccccggtgctgtaagccacaatttctaactaatatagcacatccgcaacatggagacagtaggataaaagatgctggtgcactgccctttctgaactgaaactgtagccctaggctgggagctggggagaggtggagtcccattttcttgtccgtgactacccagcatagagcttcaattacacagagttggctggggatgtggggaatagggataatttgtggcttaaatgccctcagactctcgctgctctatacagattgagtggaatttcttgaataaacatttctttatttgctgtatgcccttaggacaatttcctgagacttaactagttgtttttataaaaaaaataattttcatcagttaaatggttgttttgccgggaggaaggcacccatgctcttcacactgacttctggaagtcctgctttatagtttgaaatattttgcatttaagtctatgatccatttcaaattaattttcacattttgtgtgagataagggtcaagatacattcccccccaatatagatatctattaaaaggactaatctttgcctggtgagttgtagtggtacaattgtgataaatcactgattgtctgtgtgtggatctgtatctgaactctgtttcattccattgataaaattatttatctttcgcaataccacgctctaaattattatagttttatgaaacttcctgatctgttagggtaagtcgtataactttgtttagtttcttcaatattgtattggctatcttgtcattttcattttctggtaatttttaaaaaaaatatgtatagagtcagggtgtcactgtgttgcccaggctggtcttgaactcctgggatcaagcaatcctcttgcctcagcctcccaaagtgctaggattacaggtgtgagccaccgtgcccaaccatcactttctgataaattttagaatcactttgttaacttatacaaaaccttgctgtaatatttattgagtttgcattgaatttatcgatcaatttggggaacactgacatctttgttatattgagtcttccaaagcataaacctggtatgtttcccatttacttaggtgttctttagtatctttcagcagagttttgcagaggtttctcacctttctttagatttaattctaggtatttgttatttttgatatcattgtaaatggtaatggagaattggcttctatctagagccgtaaaacaaacctcaacaagttctaaagtattgaagtttaacagagtaagttgtctgaccataatttgatcaagctaatgactacagaaagatctccaagcacttggcagctaagcaacacaactctaaataactcatggtttaaagatgagtctcaaagatttttaaaactatatttaacttaatgaaatgaaaatacaatatatcaaaatttatggaacatatataaagcagtgctaagtgtgaaacttattgtgctaaatagttgtattagaaaaaaggaaaaatcaataatctaagctcccacatcaagaagctaggaaaaaataaaagagcaaaataaacccaaagcaagaaggaaggaaataataaagaggagagcaggagtcgataaaattgaaaacagaaaaacagtctagaaaatcaatgaaataaagagttaattctttgaaaagatcaataatcttttgatagttttagcaaaactctcaaaaattcaaagagaagacacaaattgtcagtatcaggaatgagacaggagatataggttttgcagacactaaaagaataatagtggaaaactaggaataactctacacaatttgacaacttagatgaaatggaccacccatttaaaagcacaaatgatcacaacacacccaatatgaaatacatcattttagtagccttataactattaaggaaatagaattcagaatttaaaatatctcctaaaaaggaaatctccaagcccagatggttgcacctgagaatctaacaaatgtttaaaaagaaattgacaccaattctgcacaatctcatccagagaatagaataggagggaattcaattcatttcataaaatcagagttattttgctactaaaatcataaaaagacaaacaagaacaatgacaacaacaaagcaatgaaactatagaccaatatccttcatgcaaaaatccttgacaaaatatttgtaaattaaattcagcaatataaaaaaatacttacacatcatgcctatgtagggcttattccagaatgtaagcctggcagaatatttcaaaaatcactctcagtgtaatccatcatattaacatgctaaagaagaaaaatgacatgatcacatcaattgatgctgaaaaagcatctgataaaatttaacacccattcgtgattttaaaaactcccagaaaaacaggaatagggggaatttcctcaactcgataaagtccatctacaaaaaccctacaactaatataataagtaatggtgaaaaagtgaatgctttccacctaagactgagcaaaggagaggaagtctgctttcaccattcttattcagtgtattgctggacattctaaccagggcaataagtcaaggaaaaaaagaattacaatttatacagattggaaaggaagcaataaaactgttcctatatttgtaggccacacaactgtctatgtaaacagtcccaaggaatctaaaaatgtactcctataactaataagtgagtttagcaaggtttcagaatgcaagatcaacatagaaaaaatcaatcgtgtttctttataccaataatgaacatgtggacattgaaattaataacaaaatagcacctgcaattgttcaaaaatgaaaaagttaggtgtaaatctaacaaaacatgtacaggacttatatgctgaaaattacaaaatgctcctgaaagaaataaatggagagacatgccattttcatggattgtaaaactcaactagtaaagatgttagttccccccaaattgattgcaatttatattttattttattttgagacagagtgtcactctgtcacctagacaggagtgcagtggcgcgatcttggctcactgcaaacctccgcctcccgggttcaagtgattctcctgcctcaggccccctagtagctgggattacaggtgcgcactaccatgcctggctaatttttttgtatttttagtagagatggggtttcaccctgttagccaggacggtcttgatctcctgacctcgtgatccacccaccttggcctcccaaagtgctaggattacaggtgtgagccaccacgcccggcctgattgcaatttctatcaaaatcccagcaagattttatttttgggggggcgggtgggtatagacaagattctatatttatatggaaaggcagaggaactagaatagctaaaacagttttgacacttgtaccttttcttgttaatttcatgtacaacttttcttgaataaccaagctggcaggtgaggctcatcaagaatatccagattcttgatcttcttaggctttgtaaaggaggccaatacccttcaacgtgcatgggaggctaagaatggagcttgggagagaagagccctccctaaggttactgatgcggtcaggatgattaggagtaagggctcccccacaagttgtggcagcaggtgggggatggagtgtcagatcagttgtcatcactgagggctggcttccttactgcccgggtcctgccagatctgctgccttcctcataggcattggtttaccttgtgattttgtttatctgggctgcactctcaggtgctgtatcacatatcatctgccacttactattattactattattacaatctgcactctagaaccacatgccctttggatcctcacaacaactccatgaaaaaatcgcagctgtcactcttctctggttctcttttggagtttatggtgcctgtgcacttctgctagatcacgtgaaaactgtggatatgactccaaatagttctccagggagtaaacaaagtggtttggggcatcatcttttgaaacttctaaggatacagtgcctgggaaatatagaattagaaggtgtttagtagaagggggattaaaatagatgggaagagccaccttctctagtttcatgttcattggtaatggccggtggtactggaggccatgagcttcctcaagccacaacatggagtaggacttggctgcattcactctctgatatggagtagcccaggagaggaaaaaggttatagtataaggggaacatttttcatttgcaagtacagaagacaaaaacgaacacccttcctcttattttgctcacataatctcattgtcacctgcctgtacatgctttcaaaagctgcctgtacatgttttcacctgcctgtacatgctttcaaccatggaatatttgaacttggatcactatgttagtcaggtgattgcatccataaaaaaaccttcatattccatcatttttttccatttcctttatctctcaaccttcacccacagtcatggtgtcagaaactgcaaaacaaatgaggagagccccaaattttagacctactgtccgtctctacagaaaatagaaaattacctgggcatggtggcacatgtctgtagtctcacctactcaggaagctgaagtgagaggatcgtttgagccctggagttcaaggctgcagtgagtcaagatggcaccactgcactccagtctgggtgacagagtaagaccctgtctcaaaaaacaaaaagcaaacaaacaaaaaaagacctactcaagcccaatcctatctccaagacaatcctgcaccccagttctccacttgccaatcttactcagcttccttcctccttccttatcaccttaatcttaaccatggttaatctttaacagctgctccctcctttttccaactggtaaacttcagcatattcttagaatcataaacgaagatattccaagagttttccctgcattctctttcctagaagggtccatgcttctctggccctgctgtctggactcttaactgtgtcagttagatcctatgcaaagatagttccaaacccaagcctttagagctaatctggaactaagccttccccaccctggcctgccctccctgagatcaacctagtggccacacttccagccccatccttaacctcctttctttctctcccagctcctgcttatgtgtcagtctgtctcctcctcttgtgtccaagggaagtcatcggtgagtacaaggatgggcaagagtgaagaggaaggaggctgactttggaaagtgggcatgggggttcacagagggctcctgattgggggatgtagtgcctggttatccttgagctcacaccaacaatgtctgtccatctgtccagctcccgctggctcagaaccatggctgtgccagccggcacccaggtgtggagacaagatctacaaccccttggagcagtgctgttacaatgacgccatcgtgtccctgagcgagacccgccaatgtggtcccccctgcaccttctggccctgctttgagctctgctgtcttgattcctttggcctcacaaacgattttgttgtgaagctgaaggttcagggtgtgaattcccagtgccactcatctcccatctccagtaaatgtgaaaggtagggaccccgtccctggccagggggtcgggggaagggaggtggaaatgaggaggggagtctagatgtcttcatcactccttttgaagagccctggccctgtagtctaatctctagcagtttctcaaatattttcagttatctccttgtctgttattcgtaatttcttggtttctttttctctgtagcagaagacgttttccctgagaagacatagaaagaaaatcaactttcactaaggcatctcagaaacataggctaaggtaatatgtgtaccagtagagaagcctgaggaatttacaaaatgatgcagctccaagccattgtatggcccatgtgggagactgatgggacatggagaatgacagtagattatcaggaaataaataaagtggtttttccaatgtacacacctgtacccaatgtcgtctcctttcttttttttttttttttttggattgaaataggcaaggaagactattcaagactattgcaatggaggaaagagattgaactcagttctgctgaaacaaaaggctggagagtttttaagtacactattattgtgtgggagtctaagtctctttgaaggtctttaagagtttcctctattaatctatgtgcttctctgttggttgcaaatatatttaggataattaggtcttcttgttgaattgaaccctttaccattatgtgatgcccttctttttttatcttcattggtttaatgtctttgtctgaaattaggattgcaactcctgcttttttctgttttccatttgcttagtagattttcctccattcctttattttgagcctatgagtgccattaagtgtgagatgggcttcttgaagacagcataccattgggtcttgcttttttatccagcttactagtctgtgtcttttaagtgaggcctttagcctgtttacattaaaggttagtattgatatatgtggatttgatcctgtcattgtgctgttagctggttattatgttggcttgtttgtgtggttgctttatagtgacactggtctgtgtgtttaagtgtgtttttgtattagctggttgtggtctttccttctatatttagtgctccttgcaaaatctcttgtaaggcagagctggtcgtaatgaattccctcaacatttgcttatctgaaaaggatcttaggaagcatagtttggctggatataaaattcttggttgaagactttttctttgagaatgttgaatatagatccccaatctcttctggcttgtgctgagaagtctgctgttagcctgatggggttctctttgtaggtgacctgccttttcgctctaggtgcctttaacattctttctttcatttcaaccttggaaaatctgatgattatgtgtcttggggatgatctccttgtgtagaatcttgcaagagttctctgtatttcctgaatttgtgtgttggcttctctagcaaggttgagaaagttttcatggacaatatcctgaagtatgttttccaagttgtttgctttctccctctccctttcagggatgccagtgattcataaatttagcctgtttacataatcccatacttcttggaggtttggtcatttctttttattttttatttttctttatttttgtctgactctcttatttcaaagaaccagtcttcaagttctgagattctttcctcagcttggtttattctactgttaatacttgtgattgcattgtgaaattcttgtgttgtgttattcagctctgccagacctgttaggttcttttttataccagctattttgtcctttggttcttgtatcactttattgtgactcttgttttccttggattgggttttgccatcctcctgaatttcagtgatctttgtttctatctgtattctgaattctacttctgtcatttcagctagttcagcatggttcataactcttgttgcagaactagtgtggtcgtttggaggacatatgaccctctggccatttgagttactggagttcttgcattgcttctttctcatctctgtgtgtgagtgtttctttaaccacagtgtagattaagtacagtcaatagacttcttttctggatgttttccctgggctgaggctttgtgtggggtctttatttgaaactgacttcttgtctctggtttcagaggccggatatgttagtaaggtattatttatgttgacgctttggggtgtgatccagcaggtggcacttaggcttattggtcagttgtatggctcccctatgtttcctcacagttgcagctgtgttttctcacaatgctctgaaagtgtgggttcctctccctcttgagtgctggctgtgattatgacttgggactcctgggctgcccactgcagctctggggtgatctcagtgtttatgttccttcctcaagttggaagcagcagaggaagggatcttattagtggttgtggccaagggttgtttgcttgtctcctgggggctccattccagagagatgaaggtcagcagccactcagtgcagtcagctcaaggtggagcatctgtgccgtgggtccatgccaggggttccctgcctggtgatgagcagtgggagagggagtatgggacccatgggaaacagactgatctcctctccttgggttgactgcagcttgttggaggtgtgaataaagcgcttagggcctttgctcctttgttagtctgagggtggcaaggacagttccactgcagaggcagtggcagaggggctttcagatggcgctggaggctctgttcatggagttgctgagttgctactggcttcatagctctggcagggggtggctggaggcctaggcttggagaatctgcctgatgaggagacatgggaatgggcaccaatgtaacagtctgtcctcttttctgtagggctgctgtggtattctgggggcctgctccagtccttagttgcctcagatagtccagtacctggaggtatcaccagtgaagactgtgaaacagcaaaaatagcagcagtccctccctgaagcttcatcccaggatggtacaggcttgttgccaatgcaaaggcacctgtaggaggtggctgaagaccccatttgggaggtcctgcccagtgaggaggaatgggatcagggacctgcttaaagaaacagtctggccatgttttggtagagcagctgtgctgtgctgggggtccatgtcagcccctggttcctcagatactctgaggcctgaaggctggaacagctaagtcatctaaatggcaaagatagtggcccgtctctccctctgggagctctgtcccagggtggttacaaatctctgtaggatggagaacacaaacaggggtgactgtaggtcctggttgggacattccacccagtgaggaggaacgggatcagggacccatttaaagaagaagtctgaccaccttttggtggagcagctgtgctgtgctgggggacctcttctgcccccagtcagctcagactctccaatacccaaaggctgaaacagctaagtcacccaaacagcaaagatggcagcccacccctccctctgggggttccatcccagggagaattcaaacctctgtcagctggagaacatcagcaggggtggctggaggccccagttgatcacctgcttcctgatgaggataggagaagcacttggtacataccattttatcaatttagccagtgtcttctgcagcatccccatttcctcagagggtcaagaccaatttacagtcacctggtaaaggagaacaatagacctttacgtcttgcgtgagggatatttacataaccttatagtggctgctgacctgagtagatggagtgcgctggagaaggcacgtgttttccattacattgatgatatcactaacttctgagtcttttttcagcttacaaactgcaggccccaccttgctgtctcacttcgtgaacagaggatgggtggtcaatgtagacaaagttcagggtccaggcttatcaaatacttgagtgtcgtctggtcaggtaagactaaagttgttccatctgtcattatagatatggtgtaggcctaactgtgtcctaccacaccaaagcagttgcagaccttcttaggccttctagggtattggtgtctttttattccccatgtggcccaacttgttaggcccttgtactgcttagtcaagaaaggggcccactgggactggtccacaaaggaggatgatgcctttggacaagctaaactcacagtgaagtgaatacaaaccttgggtgttctagggcagggacggccttgtaaatttgacgtagccagttactccaagaggttagggcgcagcctgtggcaaaggtgaggacacagatatgtgcctgtagtattccggtcccaactatggaagggtgctgaagttatctgtagaatcatggatcaacaatgctacactacatatcatgccttacagcaaagggaggatgttacaaagggggtcccattctagtctgcagccagcaccccatagcaggttggctgaaggacaccttccagaaaccaaagtctgggaatgcccagacacagagtgtggccaaatagcatgcatgcttgcacagaggagcacattaactagcacagggagcacattaactagcacagggctccatttggtgcgtggccctgtcacctacatgacagctgaaggagggcctttgacacagacactgagcctccgcaaattacctcctcatgcaagagggacagggcccgatttctgaccaggcctggtacagaggtggcttgtcacgaggcaatgcctgcacttggatagccatggtcatccagccatccactgatagtatctggcttgatacaggcaaaggacataatagccaatgggctgagctgtgagccgcctgggttgtctcttctgtgagccggacccaatagtcctgtgcatcaatagctggtccatctttaagggacttaccatgtggctactacagtgggaaacactggattggatggtagctggccgccccctttggggaggctgacatgtggaaggacattctccattgtatctcggacatgcatataatggcctagcatgtggatgcctgcacagcacctgcaccacctggaaatcagcaggtggactagctatcccacattcatctactggaggaagttctgtttctaacttccaaaaaggtgttagaaacagaagatgtggcccactggctaacaaagaggacattaagaacaagatacctatcgggggacctgccccgataatcacataggttcttttctattttcctaagcgtcagctggcttgagaaataaagggacagagtacgaaagagagaaattttaaagctgggcgtctgggcgagacatcacacattggtaggatccttgatgccccacaagccacaaaaaccagcaagtttttattagggattttcaaaagggaagggagtgtatgaataggtgtgggtgacagacatcaagtatttaacagggtaatagaatatcacaaggcaagtggaggcagggcgagatcacagggccacaggactgaggcgaaattaaaattgctaatgaagttttaggcaccactgtcattgataacatcttatcaggagacagggttttgagatcaaccggtctgaccaaaatttattaggcgggaatttcctcttcctaataagcctgggagcgctatgggagactggagtttatttcatctctgcaatctcgaccataagagacaggtacgccccggaggggtggccagttcagagacgtacccctaggtgcgcattctctttctcagggacgttccatgctgagaaaaagaattcagcgatatttctcccatttgcttttgaaagaagagaaatatggctctgttctgcctggctcaccggcggtcagagtttaaggttatctctcttattcgctgaataattgctgttatcctgttcttttttcagggtgcccacatttcatattgctcaaacacacatgctttacaatttttgtagttaacacaattattacagggtcctggaatgatatacatcctcctcaactgacaggattaagagattaaagtaaagacaggcataggaaatcacaagggtattgattggggaagtggtaagtgtccatgaaatctttacaatttatgtttagagattgcagtgaagataggcattagaaattacagaagtattaatttggggaactaataaatgtccctaaaatcttcacaatccacgttcttctgtcatggcttcagccgttccctccgtttggggtccctgacttcccgcaacaggtaccctttgggccacagtgaagaactggtgcccaccactatgacataaagacatagtacacatctgtcaataatgtcctgcgtgtgtgcaggagagccgcagccccttgctgcatgatactgggcagatcagccagggtcggagcctggctccgtggtggcaggtagactatataggacctttgcccgtatctgatggctgctgctatgccttgacttgtgcagacccctacaatggggctaatgcaggcatatcccagcaagcgtgccacccagaaaaccaccataaaaagactagagcagctgtgtgcaacatatggcatccccttccgatatggacggggaccagggctcacactttactggacaaaaatacattatctattatggactgaatgtttatgtcttccccaaaatttgtatgttgaagccctgaaacccactgtagctgtaattgaatgtggagcctctaaggaagtgcttgaggtcataagggtagggccctgatctgataggattggtgtccttataagaagagccaccagagagcttgtactctccctgcacacacaaaagaagaggccatgtcagcacacagtgagagggcggctgtctgcaggccagaaagagagccctcaacagaaacggcattgaccagcaccttgatcttagacttccaacctccagagtgtgagaaaattaacttctgttgtttaagccacccagtctgtggtattttgttatggcagcctaagtgtcctactatgatatcttaatatgtattatctagaaggaggaaaggctaaaacaaagtcaaagccgtgaataccgaggactacgggcacataccaccatgccagctaatttttgtatttttttagagactaggtctcgctgtgttgcccatcttggtctcaaactcctggcctcaaatgattctcttgcctgggcctcccaaagcactgagattacaggcatgagctgccaatacccagacaaggattacatgattgttttgaaaaacattatcgttggttaaaaagattaataacaagggtggcatcagttttgagtttggacaggcagttgctgggcaaatgtctggtcttatttaaagcatttcactcttatgtttttgagaaaagaacttttatctaaggaatgaaaatattttcaattttcaggcccagagaggcattaaaatgagacatccaatcatgtcatactcctccctttgagctatatcttcatctctggaaactgcttgctattgccacaagtagctataaattaacctaataatgccacacctgacactataacccacaccctataacttaataatatgtagccagtcactaaccagtgccatttctgtaaacccatgaaaactgacaaacaactttgtatcaaccccactgcttgtccccctttttttgcctttaaacatccacttgtaactgctgctaagcagagtgtgcattcagtgcaacttgcatccatgatcccaggttgcagttctcaagcttggcccaaataaagttctacttatataattttgcttcagcttcttcctttaaggttggcatatcctacatgctgtaatttttttccctgtttttttctgtacttattttttcctgaatagatcagtagattgagtgtgtgtgtgtgtgtatgtgtgtgtgtgtgtgtgtgtgtatgtgtatgtgtaccttttttctccactaagattatttggaaactatgtgtttgtttgcccactggttgctatatccaacatagtgggaccctagctccacaaatttttcttttttaattagccaggtctggtggcatgtacctgtagtcctagcttctcagaaggctgaggctgaaagatcacttgagccaggaggtcaaggctgcagtgagctatgattgcaccagtgcactccagtctgggcaacagagcatgactctatctctaaaaaataaaataaattaaaaatgttttcagaaatctttaagaccttaaaaatagaattgcccaatccaatataaattgaatttcagtggactaaattaggtgaatcaacctgaagacagtagaaatatcaagattgtttcaattgaatgcagtgatagagaaagaacaatgaccataaaaatacaaagtaaaataaaggccatacactctaaagcaaaaataatgccactcaaaagaagaaagtggagagagagagtgaatagatgttttcaaggtggataaataaataaatctgtattggtgatagtgttggagacctaatgagaacaaaactaggagtaattgtatgagaatatgggtgagcaaagaataatgcctttatttaaataaagtactttgggaggccaaggtgggcggatcacctgaggtcaggagttcaaaaccaccctggccaacaaggagaaaccctgtctctactaaaaatacaaaaatcaaccaggtgtggtggtgggtgcctgtaatcccagctactcagaaggctgaggcaggagaattgcttgaacccgggagtcagaggttacagtgagctgagatcatgccattgcactgcagtctaggcaacagagtgagactctgtctcaaaaaaaaaaaaaaaaaaaaatggagataacaccctagaattgccagaatttaatcttttcaagtatttgtatgatttgctttcaaataaatggtacctagtgagatctttgctaatgtcctgcaagaaacattccaaattgatctcagattttctgcccaagtagtagaaattgaatgactagctcagtttctgaacattctgggtggctagaagggggatgcaagggctccatggcaccatatgggagatatgaaaaataaaatagggatagctaaatgacatgtccagggtagcttactaagtgggtgcaccgagagagagtaagaatcgggctctcaagcttgagactcactgtgttggtgtcactcactgttgtgtatcagtgattgttgtgggaagtcagggaacccgaatggagggacctgctgaagccgtaacagaagaacataaattgtgaagatttcatggacatttatcacttccccaatcaatactcttataatttcctatgcctatctttaatctcttaatcccatcatcttcataagctgaggatgtatgctgcctcaggaccctgtgatgattgcattaactgcacaaattgttcgtaaagcatgtgtgtttgaacagtttgaaatctgggcaccttaagaacaggataacagtgattttcagggaacaagggagataaccttaaagtctggctgcctgtgggctgggcaggacagagccatatttctcttattacggaaaacaggtaagagaaatattgctgaattcttttcccagtaaggaatattaataattaacagccctgggaaaataatgccttcccaggggggcctctaaaatggccactctgggggtgtctgccttatgcagttgcagataagggatgaaacatgctctggcctcctgcagcacccccaggcttgctaggattaggaaattccagcctggcgaattctagtcagaccagttctctgctcttgaaccctgttaagatgtttatcaatgacaatgtgtgcacggcgggacatgaaacttcattagtgattttagtttcaccctgaccttgtgatctcgccctgaccttctgcccttgtgatcttttgtcgcccttgaagcatgtgatctctgtgacccacaccctattcgtacactccttcccctttgaaaattgctaataaaaccctatttgtacactccctcccctttgaaaattgctaataaaaacttgctggttttatggctcagggggcatcatggaacctgccgacctgtgatgtcttccccagacaccaagctttaccatttctttcttttgtactctttcgctttatttctcagactggccgacacttagggaaaacagaaaagaacctacgttgaattatcgggggctgcttcccccgataagtgatagcctgaatgagtcactttctgggtcaagagccaggagctaagtcaaggggagtcagccagagggaggtgctattcaagacgagattatgggtggggttcagattgacagagagaagaagctattgggcaagagtggtgacttgctcactcagatgagttcgaagataatctctactgataaaacaatcaaacttagaccataccattcatggaatgacatggagatgcacatttcagagtattgtgtcttatttttctctatctccattttctgtcagggcaaattaactctgagtacaatttacaactgccttctcttccttggactcagcatagctctcagcagtctcctgtcttatagggacagcctgctgtttctcatattccataggtctagtctattgttgacttacccaacctctcaaggagaaaatgcgagtacacttactttatcttttgataactcccttcttgaactccccatcagtatgaagctcaccctgttgaatggcctagatggaggatattacaaggaaccaaaaggacattcaggaaaagtgagaattttttttaccaagtgataagttttataagaatgaaaagtgggtgccgtacaggtaaaattggtgcaaataatatattgttacaccaaaaggaatttgaagctctgaagaactttcaccaggaatctgaattgcaaaaaaaaaattatgtgtgatgaagattaatgatagaaacatccctaattcaaaaggtcttatttttgctttggattaagcatgcaaaaatctggagtagtccttggcaggaagtgttcttgctgttgactccagagatacggactttggaagtggaagccattaacctggatgtaactgaatggttatatagtctaaggtagaagaaatcgtgtaaagcctgatagtaaaaagtggcaaattgtcctgattatcaaggggggaattgggtagttactacacaatcggcagaagagagtataactataccactcacacaaggcattctgtgggatgcctcttagaactcccacgtcccattgtaaaacatgggaaaatgataataatccattacaggaaggactcctgagggaatgtatacttcatgaagacgtgagtaacttcaccaggttaaaaaatcacagccagttgaggtgtttgctgagagcatagggattatggaatggatagtggaagaaattttttttcaggtggagttctgttacgttccccaggctggtcttgaactccggaactcaaatgagcctcccacctcagccacctgagtagctgggattacaggcatgtgccactgtgtctaacttgaaagaggaaatttttaaatgccagctttagcctcaaggccagctgctgaaacaaggactaagttagatatttatataatcttcctcactttgatgtgtatatatatatattttttttcagacaaggtctcgctctgtcatgtagactggagtgcagtggtgcgatcttggctcactgtaaccttcactttccaggttcatgcaatcctaccacctcagccctctgagtagctctacagacatgtgccaccatgcccagctgatgtgaatatagtttctgtattaactgagtcctctgctttttgtctcagtgccttcatacccctctatgtaatataggtttatattggttgatccttggtatttatagcatgaaagagcaaaaggggttgttagtcatctgggagacggactagcattttcaaatatctcttccatagagaagattaaaggtctttgggttgtaaaatgaatagttgcatcacattaggtggaaaatagtattgttgctgcttttatttggaagttgaaaatgtctacagatgcttatttttgaatggggtggactgtgctagactttctgttgtcaacgtgtccccaacaccactgttccttctgaagtgggaaccacgttttccagaatcacttcccctatatggagcccagaaggtgaattgtatgatgtggaaaattcaggaataacaagcactatcgtatcctcatgtgattcacgttctgacccattataaagcagactacctctgttggtccatttccattgctataaatgaatacctgaggcttggcaatttataaggaaaagagatttaattggctcacggttttataagctgtacaggaagcatggtgccagcatctgattctggtgagggccttgggaagcttacaatatggcagaaggcaaaggaggagcagtcacgtcacatggcaagacagagaacaggagagatgtcagactcaagtcaccagctcttgcacaaagtaacagggtgagaactcacttattactgtgaggagggcaccaagacatttgtgaggaatctcctcccatgaccaaaacacctccccaggcctcacctccaacattggggatcacactttaacatgagagttggaggggacacacatccaaactgtatcacagacaagggcaggaaattgtaaactttcataaccagagctagattgtgccccaaccacagatgctgtgccagatgttgtgtctttattggggcaaatcaaaacagagtttggtacttggtatgcaattattgatctggcagttgtgttcttaccaaaaccctgcagcctcaagtgtgtctgggcaaagatggagctggggtaaagtcctttggactgggtatgagcccatggacgagaacatgcatatggagtcaagtcctgggaaggccacctagaggagggagcagaaacaggacagatgagcaggtagcacccctgcctgcctgggctgagaaaggacttagcactggcgaatacagacccaccttttcctcacccagaaaagcacaagtgagctatcacaggacctggagtcgaggtaggaccgaccacagaattttcagggctcagtgcaaagtgaacatgcagcgctgcttgttcaatatgtgttttggatttcaacacagtgacagcagagcataaaaccaacaccgggcccttgtaagtgcaggggacccgcccttgtggctggctctggagatccacatcctgagatctgacacgagattacaattatgtaagaactcttcctccctgtttttccagaacaaaaactacatagagggaggaggaataaaatatcaggtgggaaagaaagaagtggctggtaacaccctcagcatagctgaaagtttcccaatcatggaaaaactggatgttggtgggaaaacattgaggactcgtcctcaattttccctagtgacaagtaaaggcacctccatataataaatgtatgaggagtgggtagggcaataggaaagacgtttccccagtgctcctcacacttgatatcctctgacatttatgcttctaaccctggggttgggagctgtcaaaaatgcagcccagtctctcagaccctctttggaactggcaggtgactccaaccaaattcccagattaactctctaaattcccatcctcttctggaatgtggctcggtaattgctcattactttgttaggtcattgatgcttttaagatgtttttgtattttgttcagcttcttttattgtctttagcaaaaggattgatccaaattaccaggtctgatattactacaaaccaagaccaattatctgaattttaaaatctttaaagcttgcttgtcaagaatctgggtgttcaaatattgtgatatttgaagtctgagaagtacaagaatgatagaagagtttttaaaaattagtaaattattaataacttggtctatatattcctcccagagaagtaatatattaatacatgaatctgtctctgaaaactaataatgtctaacacttatcgagcacataatatatccaaaatattaccctaattttcttatatgtattaccttattttattctcccagcacatttatctgttaatactaattcctatttcaaacttacagataataaaattgaataattcacagtgaggttaagcagctgactcaggactacaaagatagtaagaatcagaatcagcatttgaacccaaagtatctaactgtagagcccaggttcttaaacatcactctacaatgcctccatgcagggcagggaatagagttgaatgagagaggtatacatctctggtgcaaaatttaagagggtgtcaaaaaatgagtaaggtaatactttgtgccaaaaaatgaataagataagtaatactttgtgcaatttttttttttagacagtctcgctgtgtcacccagactggagtgcaatggcatgatctctactcagctgcaacctctgcctcccaggttcaagtgattctcctgcctcagcctcccgagcagctgggattacaggcgcccgccaccacacctggctaatttttttgtatttttagtagagacggggtttcaccattttggccaggctggtctcgaactcctgacctcaagtgatcctcctgcctcagcctcccaaagtgctgggattacaagcatgagccaccgtgcctggcactatttttttttttttttttgaaacggagtctcgctctgtcacccaggctggagttcagtggcacaatctcggctcactgcaacctccacctccctggttcaagcgattgtcctgccttagcctcctgagtagctgggattacaggtgcatgccactacgcccgactaattttttttttttttttttttttttgagtggagacggggtttcaccacgttggtcaggctggtcttgaactcctgacctcgtgatctgcccgcctcggcctcctaaagtcctgggattacaggcgtgagccaccgttcccagcccagcactatttttaaaaatcaaaattaatgccaaaaaaaaaaaaagaaaagaaaactggagaaggatccaattggatgactagatgcaggtagtatgtgcctcttccacagagaggaacaaaaacaggaagtagatattcacattttgaatatattgtttaggagagaattctagcattgaccaggcaagagacaggaaacagcagaagtaagtaacaagagggtttgaggccactcgcccacttggggacacactgagagctggagatgctctaggatgcaggaaaacagtgagagagaaacccgcagggatccaaaatgagcttttataatcttgactctgggagaaaccctcaaccactaaggccacaggcctgacatacagagctgcctaaagattgcacagggccattgctgcagaaagggagccctcacagaagcccacaggcatctgaacctggaataacctcaactgggagccatttgagagcccagatgccagggatctacacatgtgggtgctgctcctagggggaagtggggatcctaggggctgtcattcacccctgggagggtccctgccaccctgcagcaggctgctgttgagactgcgatgtgaccggaccacactccccccagcctgttgcccatgctgcttgcctgagatgcgccccatcctctctggtccaaggctgaaagcaccattttcagtttatcactgggctgcaccccacattcaggccaagttggaggcaatgtgactgaatctattgcccagttgggagaagaaaaggggagtccaagctcttctaagcacacgcattaccctacccactgcccttatcactttatgtggttccagatatcttgaaggttttgctcattcttcaatcttttttagcccttaattttgtttgactggattgtttcaaaagatctgtcctctactaaaaaaaaaaaatagctgggcatggtggtgcaaacctgtagttacagctactcgggaggctggggtggcaggattgcttgaggtggagttcgagaccagcctggccaacatggtgaaaccctgtctctactgaaaatacaaaaattagcggtgtggtggtgggcacctataatcccagctaatggggaggctgaggtgggaggatcacttgagcctgggaggcagaggttgtagtgagctgagatcgtaccactaccctccagcttggatgatagagtgagactccgtctcaaaacaatatacagatagtttacttaatcctttatcaaatgtgtactgaactaggaatcaggcaatgtaatatatatatacatatatatatacgcattatatataaaatactccacataagaataaaaaaagatgtaattatgcacatcaggccatcaaagaatgagaaagaatgagaaaactcttggggacatggtccaaggtagtcaagagccccaacattttagggtccagggacccttccaaatccctttggagagtcctcctacccctcactccctgctgtcctgtgattccacccccacctggacacaggagggtgaggatggaggctgcagctgggggagatgaggggcactgcagatgggctgggagatgcagtggggcagtgagagaccaggaggagctctaaaccaaaaataaaatcttcagctccccagccaactggacagagcctctcttggccaaggtgacccaagagaaatctgaaaaactaaattccaggccatgatgggaagggaggtcagacaccccttgtgttcaatcccttccctcttggagtttaggcacaactggccatcattaacattaaaatagagagcgtggccgggtgcggtggttcacgcctgtaatcccagcactttgagaggccgaggcgggtggatcatgaggtcaggagttcgagaccagcctgaccaacatgatgaaaccctgtctctactaaaaataaaaaaattagtcgggcatggtggcgcatgcctgtaatcccagctactcaggaggctgaggcaggagaatcacttgaacccaggaggcggaggttgcagtgagccaagatcgtgccactgcactccagcctgggcaacagagcaagactctgcctcaaaaagaaaaaaaaaatagagatcgtaaggctaacacaacagactctgtgacaataagataccaaatttcaacctgactgtcttataacatcacactacagatagccagccctgaaggaaatcaaaatattttgccccaaaatataattctttgacatattttaaaatggccctacaaagccatttttttatgggagaaatttacaactgtacagaatctccttcccattctaggtctttcccagatctaggagagattaaatgagagtctgacaccttttaggtctaaaaagaaacatttatcatctattctctctgaagcctgctaccttgagatttcatctacataaaaagaaccttggtttccacaacttcccttatctgaacgcaagcattactttctactgacttcaagtctttagagatagcttagctctttcaaccaatcagaaaatctttgaatccacccataagcccccacttcaaaatgccctgcattttcaggctgaaccaatgtataccttacgtgtattgatttatgtctttgcctgtagcttctgtctccctaaaatatataaaaccaagctgtaacctgaccaactcaggcacactttctcagaacttcctcgactctgttccccagactgtggtcactcacattggctcagaataaacctctttaaatattttacagagtttggttttttcatcaacacagtgagtagagcagagagaagaggcagagagagaagaccagggtgggagagacgaggataggtgaggagaggaggagaaagaggcagggctgcaggggtccgggcagatctggttgtggggtggggggtctgtgagaggcagggatgcaggggtctgggcagaactagttgtggggtgcagagtctgtgagaggcaggactgcagggtgagctctgagcagagctggtcatggggtggggagtctgtgagaggcaggggtgcaggagtctgagcagagctggttgtggggtgcggggtctgtgagaggcagggctgcagaggtgcaggtgtctgagcagagctggtcatagggtggggggggtctgtgagaggcaggggtgcaggagtctgagcagagctggttgtggtgtgcagggtctgtgagaggcaggggtttgcaggaggggaaggatctgagcagcctgacttgggctcgggtggggtcctccttacttgacgtgcagctgctggtctccactctgctcagtcaggcttcacatcgggtctgatgaatccgagcacagcaggaaagagggtagaatggaagagcatttatgaggatgggtggatcgtttactgaacagtggcatctcaggacaaacattgctgttgggctgggctcagtggctcatgcctataatcccagccctttgggaggccacgaggggaggtcaggagttcaagaccagcttgaccaacgtgatgaaactccatctctgctgaaaacacaaaaattagccgggagtgttggtgcatgcctgtaatcccacctactcggggggctgaggcataagaattgcttgatcccgggaggtggaggttgcagtgagctgagattgtgccactgcactccagcctgggcgacagagtgagactctgtctcaaaaaaagcaaaaacaaaaaaacattgctattggttgggggtggcagagattatagagattcccccagggttttccctcttgttggtaacacctcaccatctctccagaagacaaatacacgcatctgtgatgtatatattcatatatgagaaacaggaatgctgcaatggagtttcgtattcagactagccctaactccatcttgattgagagccaagaaaacacctgctttactgaggcactggtattttgatgatatttttcttttttttttttttctgagacagagtctccctctgttgcgcaggctggagtgcagtggcacgatctcagctcactgcaacctccacctcccgagttcaagcaattctcctgccacagcctcacgagtagctggaactacaggcacctgccactatactcggctaatttttgtgtttttagtagagacagggtttctccatattgaccaggctggtctcgaactcctgaccttgtgatccgcctgccttggcctcccaaagtgctgagattacaagcgtgagccaccgcgcccagcagtattttgataattttaaaatagccttttatatttactacatttgtattagtcaaggttctctagaggacacaactaataggatatatgtatatatgaaagggagtttattaaggagaattgactcacatgactgtaaggtgaagtcccacaataggcatctgcaagctgaggagcaaggaagccagcagtggctcagtctgagtcccaaaacctgaaaaatatgacagtgaagctgacggtgcaggcttcagtctgtggcggaagccctgagagcacctggcaaaccactggtgtaagtccaagggtccaaaagtcaaagaacctgaagtcttgatgttcaagagcagggaagcatccagcacagaagaaagatgaaggcctggacgactcagcaagttgactcattccgttttctttggcctacttttcctagctgggctggcagccgattggatggtgcccccccagattgagggtgggtctgctgctcccagtgcactgactcagatgtgaatctcctctggcaatgccctctcagacacacctagcaacaatattttgcattcttgtattcaatcaagttgatacttaatatttgccatcccaacattgaaacctcctttgcagaattataagtaaggagagaaatcaaacatgactgactccatcttgcttccagcctcactgctacatttggttgtgtgttgtgtgttttctgttttatttatttatttatttatttatttcttattccagcacagagaccaagataactatgagaggaatttaacttatagttcaacttgcagacaagggaaactgaccctccttcttgtccagagattgaagccacattcataaggtgagtttaaaattatggaaggggacttgaattttgctaaagaataggcgtggtcaaacaatgacctgccatcacttaacttgtttttctataagttgcttcctgccccagagtcacataacagggggttgcaagatttataacttccccaactacctctgtagatcacatcactattgtgaaacctaaagcactgatctttgagagagttttcagatttagcacttcggcagacccagggctgccgcctggtcctgacactccctcccaggaactgactcagctgcgtaaagacagctttagacgtccctgtgatgtcatcaactgtttcagtttcccagctccctgcctgtcaaaggatccttaaaaagccctggcccccaaattcttggagagacgggtttgaggagtttctctctgttttccttgcttggctagccatgaaataacaaaagtctttgcaacaatactggttgttctcagtatatttggctctctgggcagtgggcaaggtgaacttgtaggattgttacaacctgattaccttcccagtacctctcctttctccctccagatctggtctccagtcagacatcattttctttcattaggaagaactttctttttagcatctcctataatacatgttcactggcaacaatttccctgaacttttgtgtgcataaaaatatactcattttatatcattatttttgaatggtattttcagtggataaagaattctggaccaggcgcagtggctcacacctgtaatcccaacactttgagaggccgaggtgggcagatcacaaggtcaggagttcgagatgagcctggccaacatagtgaaaccccgtctctactaaaaatacaaaaattagccgggcttggtggtgcatgcctgtagtcccagctaccaggaagcctgtggcaggagaattgcttgaacctggaaggcagaggttgtggtgagccaagatcgcaccactgcactccagcctgggcaacagagaaagactttgcctaaaaaaaaaaaaaaaaaaaaaaaaattctggatgcccagaacattttttctctcacaatttgcttgtgtttttttagtgcattcttaattactgtttatattgagatcttaacataatttctatttgctaaaagaaaacttgagccaagtacaagaaaaaacttataatgtcacaggcatagcttaagtccttttttgttagctgagttgattgaggcataatgtacatacagtaaactccatccgttccgtgcactgaacttgttgtgtgagttggagattggatcctttctttctcgatgcacgtgtcagccacggtgttgcatgtgtcagatcgtcccttttcattgccgagcaggactttgctgatgactgtactgccgttagtttctccatccacctgctgaaggacattgggtcagtgtggccctgcctttccctgcctcctctccctacactcctgccctctgtcttgtggtttctccccatctctcctgcctctctctgtcatctctcttgtctctcctcacattctctagtctctcctcacctcacccctttctccctttctcctcatactcttctcaatgcttcccacttctccccatctctcccagactgtattactccattctcacactgctataaagctactgcctgagattgggtaatttataaacaaaagagattaattgactcacagttccatgtggctggggaggcctcgggaaactcgacttcaattatcatggtggaaagcaaagggggaagcaaaggcatgtcgtacatggcagcaggagagcaagacgggggacgtgccacatttttaaaccatcagatctcatgagaattcactcactatcatgagaacagcatgaaggaaccacccccatcatccaatcacctcccaccaggtccttctcctgacatgtaggattacaattcgagatgagatttgagtggggacacagagccaaagcatatcacagactctcccagtttccattctctctccctctttctccagccttctctccctctctcatttcttccctcccagccactctttcttctctctcccaggctgggcctcagcctacccctcccagtctctcctgattcctcttctgtctcccagtctctcccctactctgtctctcctttctgcagactttttttttttttttttagatggagtctcactctgtcacccaggctgcagtacaatggggtgatctctgctcactgcaacctccacctcctgggttcaagcaattctcctgtctcagccttccgagtagctgggattacaggtgcctgacaccatgcctggctaatttttgtatttttagtagagatgaagtttcatgatgttggccaggctggtcttgaactcctgacctcagatgatctgcctgcctcggccttccaaagtgctgggattacaagcatgagccaccacgcccagccttgcagactcttgtcacaggtttctccttgtctttcgcttctctactaattcctcagtcccatcactcccatgcttctctaatttctccagccttctaggttttcagcattttttccccttctagttgcatcggtttttgcccccaaaattggttatttcctttttgagttcctatttgatttaagggatatctgtcagcatatttcttaactttccagtgatgatggagatcacgttttctcattatttaattctaattttattggacacacttctaattttgttctggtaaggttttcattgcattcaacacatgtataattttgcttgtgggtcataatcaaccacaaaatgcatggtgtctacttgggtagttcaaaattatatgtgcctctctctttctttcaatgtcactgctttcctttttcttttttttttcttttttaattatactttaagttctgaggtacatgtgcagaatgtgcaggtttgttacataagtatacatgtgccatggtggtttcctgcacccatcaacccgtcatctacattaggtatttctcctaatgctatccctcccccagtcccccacccccgacaggctccggtgtgtgatgttcccctccttgtgttcatgtgttgtcattgttcaactcccacttatgagtgagaacatgcagtgtttagttttctgttcttctgttagtttgctgagaatgatggtttccagcttcatccatgtccctgcaaagcctttttttatggctacatagtattccatggtatgtatgtgccacattttctttatccagtccatcactgatgggcatttgggttggttccaagtctttgctattgtgaacagtgccacaataaacatacatgtgcatgtgtgtttatagtagaatgatttataatcctttgggtatatacccagtaatgggattgctgggtcaaatagtatttctagttctagatccttgaggaatcgccacattgtcttccacaatgggtgaactaatttatactcccaccaacagtgtaaaagcattcctatttctccacatcttctgttgtttcctgactttttaatgattgccgttctagctggcgtcagatggtatctcattgtggttttgatttgcatttctctgatgactagtgatgatgagcatttttccatgtgtctgttggctgcataaatgtcttcttttgagaagtgtctgtacatgtcctttgcctactttttgatggggtttttggttttttttcttgtaaatttgtttaagttctttgtagattctggatattagctctttgtcagatggatagattgcaaaatttttctcccactctgtaggttgtctgttcactctgctgatagtttcttccttttttctacccccctccctctcagttcctctcttcttctctgggcagctgctcctctctctgcctgccagctcagtttccttgtgtctactacccttccttagggtgggccatgcctccagtccagcctggggaagggccactgtgggtgctcagaatcagagacatggggaggaggcaatgatggggagatttaggcacccgccttcactcctgctcccttagaaaatccagatagcagctgccaagtcaaggaacctgggctcttccctctactggataaaggtgggggctctagagtggtgtgggagtctagcagtcacacagcgtggtcagagccaatactgggcacctctctttctaaaagttggatgtgaggagacctggtccttaatttcttctgaagagaagcctgtttattcctagagctttgaaaataccggacctggttaatacacccagtctatacagtgagcttggatcattgaggtcgttttattattattgttgttattattactgatgtttattgttgttataaccttgactaaagtttatccatgaaatgggtttgatttactgaagttgtcgacagagggtcccctacacacacctcgcaccccggcctcccaaggtcatgtacatgccaggcaggcagtcctatgagccccgggaaatttttaagactccctctgaaggaagggacagatcagtgatggcctgagagggctatggtgggcgtcatcggcccggcctccgtcccatctggtgctgggtagtctttatgagactctaggaaaatttcctaatcgttctccaggtctcgggaacctcctgttccagccaggaagtctcgaggtgagtgtgtcctttgcttggcagggcccagtgatcacaggaggctcgccccaaatttccccaagactccctactggggccgggctgattgcgtgccggcagccctgggtgaagaaactccgtccaaggggcaccaggaaacggccgtggatcaggccgcaggcagggcacccccgccgacctgaagacccagatcagacctggtgccgtccatgccacttgtcgggcgccacctggcagtcacttttagagggttttctctggcgctccggagaattttggatgggatattacccagctgcggtgtccacagaagcgttccaggaccctggcagcggtggcaggctcttatcggtgttgaccccatgctattgtggaataaattccttgaccttgttcctgcagggaaagagtgctatggcctggatatggtcccacatggaggctgcttatcagattcactgtccacaagtttatcaaagcccagctgataaaatgaacatcacatcccgtttctcctagtcacttgtcctccttccccaggaaacctctatccagttgatagtctggccttccagaagatattacaagaaggaaggcttttcagcacagcatagatttgatggctgcagggacagatatggggtgttaattagcaaattaggcgtctcttttctacccttccctaaagtgtacaattgaaaaacactgaagtccgctgctacgtgtcaggcattgtttaggggcacagggagtccctggctaacaggaaagacaagatgcctgctctcttaacgagcctgctcttcagtgtgaaagaaaaaaataacctaagtttatttaagctttgctctcagatcacacgattataaaacaggaggaacctggtagatagtgtaaagtatttcacagtggggagacattagaaaggggggtttcctaaggatgagcacttgcttatagggagaccagacctggcttttctttagcacttgaaagatgtcagacctgctggtggttggacccagtcgatgctgctggtatgtgctacctgatcagagatggtgagcattaacccgtttaaacctgaggttgtgctgctggtgtgtgctacctgatcagagatggtgagcattaacccgtttaaacctgaggttgtgctgctggtgtgtgctacctgatcagagatggtgagcatttacccatttatacctgaggttgtgctgctggtgtgtgctacctgatcagagacggtgagcattaacccgtttaaacctgaggttgtgctgctggtgtgtgctacctgatcagagacggtgagcattaacccatttaaacctgagattgtgctgctggtgtgtgctacctgatcagagacggtaagcattaacccgtttaaacctgaggttgtgctgctggtgtgtgctacctgatcagagatggtgagcattaacccgtttaaacctgaggttgtgctgctggtgtgtgctacctgatcagagatggtgagcattaacccgtttaaacctgaggttgtgctgctggtgtgtgctacctgatcagagatggtgagcattaacccgtttaagcctgaggttgtgctgctggtgtgtgctacctgatcagagacggtgagcattaacccatttatacctgaggttgtgctgctggtgctacctgatcagagatggtgagcattaacccgtttaaacctgaggttgtgctgctggtgtgtgctacgtgctacctgatcagagatggtgagcattaacccgtttaaacctgaggttgtgctgctggtgtgtgctacctgatcagagacggtgagcattaacccatttatacctgagatcgtgttgctggtgtgtgctacttgatcagagacggtgagcattaacccatttgtatctgaggttacagtttttaaatttgaaaaatcggaccttggtgatgaccttgagcaataggatataaataattcccacattcttagcattccaataatggaacactaggcataaatggggttaatgctttcttgaataatttatgagagtctccaaaagttccagtttcaccctcccccaatacctatttctccctatctttacctgttccagatcggtccttggtccagcccccagaaaggcaggtaaccccagggcatcttgtgcatgtcagggttagtggggggcccagtgtgtgtactgtagacacccatttatttgttttgtggtggagcagttcatcatgaatcttgctgtttgcacatgatcagctaagtgaaaggtccatccccagccaccgtgacgctcattcctgtgaccgccccccccactctcctctatattgcctttgtgattataatttgtgtggaccaactcccatgcaggataattttggactatcaacataaagcagcacagccttgataatgggtgatcagaagctcagtgtgttcctctctctatactgaggcttacaatagacctcctgggtctttgtgaacccatagtgttccccgtgggttctgtgttccatgaccaatggttttcagatgctcagtgtccttcctggttgttggggacccatacccagctggcccctatggccatctgacagcacttcagatgtatggctggtgggaggcacctcactccttgtttgtcctctgatgcccacatatttcctacccttgcctgacagctcatttgcctcccagcatatggccagaggcacacctttagcaactcggacagagcccccattcatcctggggcaggtggccagctctttgtgggagcatggcaggcaactgcgaagtcttccacagtgggatagagagtcctgggatgtagggaccagccctacagggtctgtgggtttttctccccatgtgcggagacgagagatcatagaaataaagacacaagaccaagagataaaagaaaaaacagctgggcccggggaaccactaccaccaagacacagtgaccagtagtggccccgaatgccaggctgcgctgttatttattggatacaagacaagggggcagggtgagcagtgtgagccatctccaatgataggtaaggtcatgtgggtcatgtatccactggacaggcggcccttccctgtttggcagctgaggtggagagaaaggagacagcttatgcctttatttttgcatttcagagacttttagtactttcactaattctgctactacctagaaggcagagccaggtgtacaggatggaacatgtaagcggaccaggagcgtgactgctctgaagcacagcatcacagggagacaggcctctggataactgcgggcaggcctgacggatgtcaggccctccacaagaggtggtggagcagagtcttctctaactcccccggggaaagggacactccttttcccagtctgctaagtagtgggtgcttttcctgggcactgacgctaccgctagaccaaagtcggctaggtaacgggcatcttcccgggcactggcattaacgctagactaaggagccctctagtggccctgtcggggcataatagaaggctcacactcttgtcttctggtcatttctcactgtgtccgttcagctcctatctctgtatggcctggtttctcttaagttataattgtagagagaagattattattataatggaataaagagtaattgctacagactaatgattagtaatattcatatataatcatatctacgatctatatctagtataactattcttattttatatgttttctttattatactggaacagcttgtgccctcggtctcttgcctcggcacctgggtggcttgctgcccacactgggaaatgtgtaagtaacacgtcctgggttgacagggtagaatctgagtaataaatttgtgaatgagcccttggggctgaaatcaggaactctgcagggaccccaaagcccagaacccaatattaaacacggtgttatgtgtcagtttgctggtgctgcagaatcaacgacctctacattcagtgtcatggaacaaccacatcatgattgctcctgagtccataggtcatctcgtgattctgttgatctgggccaggctcagttgaccttgatgggggggttgctcacatgtctgtgctcagcaggtagatagactggattctggttcatctacaaagaactcattcacctgtcctcagttgtctggaaataggcttttctgggatgtcctcagctgggacatcagggctctgtctcctccatgtggtctctcaccctccaacaggctggccagagggtgttcacattgctttaatttcctgagaaagtggaagtaccagagtccttgagcaaagtcttaactcaaaactggcacatgatcgatcactccacagtgtcctatagaccacaaattccacagggtgcagacagtcaagggaatggggacatggataccaaatcttaatagacgtaaagtcatattttgcaagtgtgtgaatgaggaaggagagataatcaggactgtatctgcagcctaccacagaccctcccagccctctttgccaaggctgaggatatttatcacgccccctggtaatcccccaaccctctcctgtggggcaaagagccttgcatcattccttcccccatggggggtgggggttgactttgaagagaccaaaaatgcatgtggctttagggtattctgcaaaatcacggacctggatctttttaccatcaaaaagaaaaattcagaaaagacaatccctgagactctggccctcgccctcagaagaagggttgactattcgggagtcccgctgagtcatctgtggtgctaggaacaccaggaatgattgagcctccagtccaagctccatctcccctcaggcccctcagtatgcaccatccccacaatgccagcatttctcaatggactggacctcaaagtgggggagaagcaggtatgtttttctgaggcatgtcaagaaagacttcattctagatatgttagagatatctcaccttcctttctaaatttaacaaaaaagttattaaatatagaattaataaaggaaaaatcatacttctagtataatttcaagagcccacagaaaacagatactacaaaactcagcccagaaagggaagacgcagggccataatgggagggagaggagaaaagagactgatttggggttgggaggccgatgtagactccagggtatgcctcactggaaggaatgctattcctcactgaattttccctcccagggcggggtgagggtcagattcaagtttggcctcaacctgagctgggctaaagagaagatcaggaagtgaggatgaggatgaaggaaggtggacaggactaggtggtggtgggaacaagtaaacgttgccagagtggataggtgcatcctgggaaagaaagctctgagctctgaggtgtgtctttatgtcatactttggattgagttctcaatctcaccacctgcaaggaacagggagggcaagagacatgagggcccttttctctctcctttttttctccaaaagaaagcatgtttttggagagccgcaggtcatcacagactcaggggccttgtgaaattatgctgggaagcagaaatgagcaaaccggcttctcatgtttgttactttgtctcacagtgaccaccataatttcattaaatattagctctcttctccccccatcatttgattactctttttgtaaaatatgggatttttacatagtttgactaaaagtatctgattttcttttgtaatcttatttactattttatttgtaatcattgaatttttgattcatacttttcttcttggcatagcttgttttccattattttatacatgtgagaggtgttcttttaaaacttcatcagcacagcaataaagtgaaaaccaaagctccttttccactctaagcccttgtctttctccttggagtgattcactgtcctctctggtgagaactcagggttccaaacgtgcctagaagagcacacccacagggacacaacagtgggcagcaggggctggggtgcaggtgccctgtggctagcgctcccaggtcaaaccctgaccttgccccactgactgtgactgtgggtgagttatgaagccactctgtgtttcagtttcctcatttgtaaaatgatgatgaaacccagacaagatgaatcaataattgtaaagagttatgaagaatgctcgatgctcaaattacattaaacattgtggaattgcttttctgaaaatattttgtttgttataactttacataaatgcctcattcttttgcttttttttttttttgaaatggagtctcgctctgtcacccaggctggagtgcagtggcatgatctcagctcactgcaacctccacctcctgggttcaagcaattctcctgcctcagcctcccaagtagctgggactacaggtgcccaccaccatgccgggctaacttttgtatttttagtagagacaggggtttcaccatgttgaccaggctagtctcgaactcctgatcttgtgatccacccacctcggcctcccaaagttctgggattacaggtgtgagccactgcacccggtctcttttgctttttaaatagaattatttgaagtatttttgaagaacaaagcatggagtcatcccagcctttctagtggctgagtattattgtggtatagtaattccctcttatctccactttcactttggcgtaggtttcagttacccatgatcaactgtgatctgaaaatattaaatgaaaatatcagaggccaggcatggtggctcatgcctgtaatcccagtactttgggaggccaaggtgggtggatcacttgaggtcaggagttcgagaccagcctggaaaacatggtgaaatcctatctctactaaaaaattacaaaaattagccgggtgctgtggcatgtgtctgtgatcccagctacttgggaggctgaggcaggagaatcacttgaacccgagaggtggaagttgcagtgagccaagatcgtgtcactgcactccagcctgggggacagagcaagactctgtctcaaaagaacaaaaacaaaacacaaaacaaagaaaaaacagttcataaattttaaagttgcgtgtcacactgattgtgaaatgccgtgtcgtcccgctctgtcctgccccgctggtgagtcatccttcgtgcagcatattgacactgtagatgctaccggctcagtagtctccagtagctgtctcagttatcagatcaactgtcatgctattgcagtgtttgtgaaagtttctcaagagggctttctttatcgtaaaataaaacctttattttactttgtaatggccccaaactgcaagagtagtgatgctggcaattcagatatgccaaacagaaactgtaaagtgcttcctttcagtaaaaagatgaaaattctccacttaataaggaaagaaaaaaaaatgggctgaggttgctaagatctatggtaagaatgaatctgctgtacctgaaattgagcaggaagaaacagaaatttgcactagctttgtgtcctacctcaaactgcaaaacttacagctgcactatgtggtaactgttacaatatattgtaactgttctattttattctatcttggatgtctcccttcgatgtaatgatgctgctctgtccagcagacaccgctctcgggtctaggctgctatcagttcaggaagagatgggtatttctggtcagagtattaccacagtgtgttggctcagcctctctgtttccaccagagcccaacaacatgttaatagctccttcagaaaaggtgcatgatgagtggccatttctgggagcctagaagtccagaaactttgcggtcatcagactctgatggcttttccttttggtcagattccagtcttcctcatctcctagcactgaaacttgtcattcaaatggggagctgggctctacgggacacaggggcctgagtaactgcctgaggtagggcctggagtgcattgtactccctggacccccactgggggtccctggaaagcagctatgtctctggttatctggtgcagggggaccaccagaatgcccagatggagtctatgttgtctttaatatccaaaatacccagtgaggcgttgactccacggtctgcaagggcctctctctgcctggtaccagatatcagatgtggaaaggctgtcaatctctttgttagaaacctcctgtggtatcagccaggcacccagaggctgcctctggcacaagcgcttgggtttagagtcttctgactttgtttattttaactttcatcactcattgggtctgatcccattctgctgcagaaagcagtaaagcttttcaatggcttcaccagggacaatgcaagcaaaaaccaatcaagggccggacacggtggctcacgcctgtaatcccagcactttgggaggccgggggaggtgggtcacttgagatcaggaattcaagaccagcctggacaatatggtgaagccccatctctactaaaaatgcaaaaatcagccagacgtggtcacgggcacctgcaatcccagctactaggaaggctgaggcaggagaatcacttgaaccccgggaagcagagattgcagtgagctgagattgtgccactgcactccagcctgggtgacagaacaagacccaggcttcctcattttatatatatatatatatatatattttttttttttttttttttttttttttggtagtgttttttgttttgagacagggtcttgctattttggccaagctggtttccaactcctggcctcaagtgatcctcctgctttggcctccaaaggggttgggattacagggatgagccactgcatctgaccaagacttttttttttttttgatactgagtctctctctgttccagaggctggagtgcagtggcatgatctcagctgactacaacctccacctcccgggttcaagttatcctcccacctcaccctcccaagtagctgggactgcaggtatgtgccaccatgccaagttaatttttgtattttttggtagagacagagttttgccatgttacccaggctggtctcaaactcttgacctcaagcgatcctctcacctcggcctccccaagtgttggaattacagatgccactgtgtccacccagtggtgccctgttaattaatgacccttgttatcaattaagttcccctttgttgtcctgccttgcttagatcagataacagaaaaaccatgactattacaccctttgtaaaaaatgttaaatgtgcccttctcatagagaaacattgcctataagcaacttgctgtaatgatgtgccaaccttttatgaaaaatgttgtaatcctgataaaaacacctctgtctttgcttatatacacgcaaagacagaggagtctaaatgtatgtatttatttagagacagggtctcactccattttctggacaggagtaaaatccactccacttgcacccccagggccgggcaggtgacgctttggcccctacctgggagacactagagctcacactgtgggcacctctggagctgactggggagattctcctgaatcctcggctcccgctgggtctggacaccctgtggcttcccgatcacaggatggcttcacacctcttccgctgtcctgggcccttgcactgattcacatctagaaggggaccaggtcatggagcaaccctcagtccgtgtctcgactctagactcacagggtcagctgtaacattgtggctgtgtgagtgtgggagggtgaggacgaccccaggagtgtcctgcaatttcctatttgccaaagaagcctccattctggaggagagagggaccgagggtggagggagcatcggtcctctcctggctctcaaaggacctggcatcaaatccaccatgacacataccctgtctgggacctgtctcgctccagggcccagcatgtctctgcaggaaggcagggcatcccacgatatcaccagctcctctaggagtataggagccaaggagctgctgagacctgctgatcacccactcactcccctccagccaccccagagccatggctcccgaggccacatcttgggtaaggaggacaggaccccattcccacccgagcccatctcccatctcagccaccaccgaggctcactccccaccccaaactacacctcatccctgtccccatgcctggcctcctcctcagacatggctccatcacagcaattccccatccacagcccctgggtcagccccatccacagctgtttcagtccccaaactactccccaaacttatgcctagccctggttccagtcccacccagtctttttctaaatgtcagtgccagccacacccatagcacaacgctagtctcggctcagccccttccctgcccgaccccagctgagcctccagctctgaactcctccaacaccaggaaacaaccacattgccctgaaccctaggcccatttcttctgagagtcctgcctgcactccctggccttgcccaggacccttgagcacagggagactgtgcctgacctcagatcaccttctagcccttcctcgagctccagtcaggacagagacccccttggacccagtgctgccgcaggctggggtcccaaagatggctcgtggcctcctccagagccctcctcttcttccttctcccacagctgtcttggcgtctctctgcatcctcagccttctctgatcatgtggagcccccaggtgagcccaggaagggctgggaatctgggggaggggtgtggctcccaggagatcccaggctgggacccacctgcccttccacctggacctcaccagctctgtctcctccagtggcccccatgggtgcttatctgatgctgtgccagccacaggcaagatgtggggacacgttctgtgaccctctgcagcactgctactatgacaatgccatcctgccctcggatgggacccagaggggtggaactgcaccttcagagtctgcttcgagaagtgctgcccctggtccctcagtcccccagcgtccctcatggtgaagatgaaaggccagaagtgctccttgaccctgacctcagataacaggctttgtcacaggtgaggtcctgtctcctccatgagattgtgggtcctggggggctgcatgcctgttctgccctgagtagagcccccattctctgtgtctgtcctcctgcctctagtcaatccacctccccctttccctacagttgtatttcttcctcccttcgtttttattttcctctcacaacctcactctctcaacattgctggcctctcctcctggctctcctgtcctcctttctgcactgttcagtctctcccccatctctggcctgctcagtgtctctgtcttcagtgtcagctcagactggagggcagtggctcaatcacagctcactgcagcctcaacctcccagactcaagcgatcctcacacctcagcctttagagtagctgggaccacaggtgtgcaccactgtgcccagctaatttttgtattttttggacagacggggtttcagcatgttgttcaggctggtcttaaactcttgggttcaaacgatcctccctcctcatcctcccaaagtcctgggattaaaggtgtgagtcactgtgcctggccaggacaggagccctggactggccctggctgccctcctcccatcacagatggggttttgtcatgttgcccaggcttgtcttgaactcctgagcttaagtgacctgcctgcattggcctcccaaagtgctgggatacaagtgtgagcaaccacacctggcccctcccctccccctccctccctccctccctccctcccttccttccttccttcctgccttccttccttcctttccttccttccttccttccttcctttctttttcctttctttccccccttcctcccttcttttttgtttttcagggtctcactctgttgcccaggctggagtgcagtggtctgatcatagctaattgcagcctggaactcttgagctcaagcaatcctcctgccacagcctcccaagtagttgggaccacaggtgtgtgccaccatgcccagcaattaaaaaaattttttttttgtaaagactggattttgccatgttgtccaggctggtctgggattcctggcctcaagcaattcttcctcctcggcctccctaagtgctgggattacaggcatgagccaccatacctggccacttcttcattcttgttggctttgcgtccctggaaaaaaaaataaattctgcctcggtatgtggcttaccagagtcatgaacgaaggtttcactacaaggcagtttcatatatagaaatgaaaccataagtttctgggtgctggctccaatttttggagttggtgtttctgggtgggctatcctcaacattcgtgctggaataaactctctttaaattagattctgaccattttgatcaccaggttgacaccatccagtctttggtcaccaaagcccctttgcaaggagagagagatcagccccttcaattctgataactatgctcggagaaaatgagtgacacagcttcctcatcagccagcaaagagaggtgtttaggctggagagcttccgtccctcctgtacacacatgcaatgccaccccatccctgcctatcccctgggaggggctccttgaggccagatggaactaacaccacaaagatgccaggtggaagagtcattctatttattcctggacaaaagagcaagtgaagagagagcctttgagagtgggaaatgtcaaggcccccacggtttcacattccaggagcccagctctgccagccccaccgaggaaccctgggaatgtcagatttgggtctcatccagggatatctgtgaccaaggcctgcctccccttcccagaggggctgggccagcagaggcagggtagggcagcagttggaggcctgtggactggagttcaggagacctgggctctggtccagcctgtgtctgtgaccagcagtgggtcctcggaccgtgtcttgcttggattagaaagtgagatgggagaattaaacaaatgtctgtctgaggtcaggatcttgcccttacttgtcagaaaaacaacctcctttcaccgtgggtagaggtagagttccaacccctgaggatcagttccaccaaggcagagctgggctccagtgccgaagacagacctgtccccagacaatggattggatagggttggggactccacggggctggcggaggcattggacagctctgtgtgcaaaggcttttttgacacctggagaaggggcagagacaggagcactggactagccctggccaccctccccgcttcccagcctctgagagccccctgcgctgtcatgatctccctccactgtctcaccccaggcctgactcagccaccctgagagatcaggctcaggccaaggagggtcagctagactcctctctcctcgggacacaatcctaatcctgacccaagaaacctgctttctcccaccagcgtctaggcctctacctgcctcgagccatcccaggaaatgcctggaaccatggtttgagagatgaagcccgttattgggagatgtgttgggacatctaagtcagcagcacttaggcaagaaggaagccaggccatgcctgcacccttcttcattcctttttaaattttttttttaattgagacggagtctcgctctgtagccaggctggagtgcagtggcacgatctcggctcactgcaacctctgactccctggttcaagcgattctcctgcctcagcctcccgagtagctgggattacaagcacacgccaccacgcctggctaatttttgtatttttagtagagatggggtttcaccatcctgaccttgtgatctgtccacctcggcctcccaaagtgctgggattacaggtgtgagccaccgcacctgccctaattttttttaatttttattttattttattttttgagacaagatctcgttctgtcacccaggctgcagtgcagtggtgtgatctcagctcactgaaacttccacttctcaggctcaggaaattctcctgcctcagcccctgagtagctgggtctacaggcccatgacattatgcccggctaattctaatttctgtattttttgtagatatggggttttgtcatgttacccaggctggtcttgaactcctgagcttaggtgacccacctgagttggcctgtcaaagtgctgggattacaggtgtgagccaccacacctggcccttttcttttcttttcttttcttttcttttcttttctcttttcttttcttttctttctttcgttcagggtctcactctgttgcccaggctggagtgcagtggtcttatcatgactaatttcaacctggaactcttgagctcaagcgttcctcctgctacagcctcccaaatagctgagaccacaggtgtgtgccaccatgcccagcttttaaaaaaaaaaaaacttttgtaaagactggattttgccatgttgcccaggttggtcttgaactcctggcctcaagcaattcttcctcatcagcctccctaagtgctgagattacaggcaggagccaccatacctgaccacttcattcttgttggttttgcttcgctggaaaaaatataaattctccctcaatatgtgacttaccacagtcatgaaggaagatttcactataaggcagttcataaaaatctgtgcagtgtacactaacccatttttgtgtctgtttcttgaattaaaaaaataatatctatgacatactcaagcagttataccacccaataaaatgttgccacccttagtatggaggacactactctttcctgaactgcaaatggagaagccaggggagcagagagcaatggagaaggagaacacgctgtcccctctccacaagggaggaggaagactgcaggcccctcgtgattgcaccattacccagctccagactcaaccctcctctccaccctcctcacaagagagatacagggatgttctacaaccataaatctggtcacttccatcccctgcttaggcctgggccatggtcagtgccctcaggatagactggagttctccaagggcccataaaaatgccccagccttgctgcccactccagtctcctcttcctgccttgcattctggcctctgggttcagctttgtcgaaacaggcacagttctcattcattcttgaaatagtagctcaaatgtcttcttctcctagaagacatcgctggccttccaggctgggtgaggcaaccactgtgggctcccaagcctttacgcgtccccaacccagccctgactctctgagtcatcaaggcctgaggacaatctgtgttcccagtgatggcacatggcccgctattatgtctctgctgtgtcctctgcagcacgtcggggtaaggatgattaggttttaatgggatagtaacgggcgtgtgattggttgccagggagggagtaaaagtgtcccatacttgtgggttaaggttgggggatacaagaggaagacgtgaaggaggctttaggttggggagaagggcggcactgagatgtggctgtagtccaggaatagtcagggtagtggataattttgttaagatgtaaaggatcattaaccttgactctgccttcagctccagccacctctctaagaggaaattgttgggcaggttggggagggctagtcacggaacaaaactgtaagctggaccggttgtgagtgggggaggcgatagaaggattatagggtgggagagtggaagctgaggaagaactgggacctcgcttggcctggtgaggagcagtgtggggaggaggggagaggtcggatgagttcacagaaaaagaagatttaaaggactcagagcttggggtggagactgaaggaacagacaggagagaaagaagaaagatctggaatgagtcacattgggagcagagactagggaggaactgatgtgtaaaaggatgcctggacatcaggcacctcagaccatttgcccattttttgacaaaattatctagatcttgtaggatggggaaatcgaaagtgccattttctggccatttagaacaattgttaagtttgtattggggtcaaatgctgttgcagaagaaaataagatgcttaggttttgggtcaggtgagagttgaagaggttttaagttttttagaacacaggctaagggagaagaaggaggaatggagggtggaaggttgcccatagtaaaaaggtaagtttagagaaaagagagggtagagacatggagaggggggttggtacttgccatccaggggaggtggtacttgccaccaaggtgaaggatcaaggcaggcgtccctgcagtggtcagacacctctggaatgtgggtgaataatcagacatgcatccccacagtgattagacaccaagggaagactgtcttcccgagtctgtgaccagcagcagaattttgagttcatggacaaaacgtgtctcctctgtctctaccagaaacggaaaggaaccaaaattaagggagggagagattaaagagtggagggatatctagcaagagaggttggagaagagaatgaaaagaggctacttacccgatttaaaattggtgagaagttccttcggctgggctgaggacccgaggtcatgggtggatctcatggagagagggcgaggacaggggaccggtctcccaaaggagtcctcctgtctcaggtcttcggcaccaaatgtcacatgagtccatatgaagagagtccaccaacaggctttgtgtgagcaacaagactgtttattttacttgggtgcaactgggctgaatctgaaaagagagtcagcaaagggagataggggtacagcagttttataggatttgggtaggtagtggaaaattacagttaaaggtggttatctcttgtgggcagggatggggatcacaaggtgcagggtggggagatcatgagactcattgtctaggggaggaatgtcacaaggttgatggattagttggggtggggcaggagcaaatcacaatgatggaatgtcatcttttgtggttcttcagttgctccaggccctctagatgtatacgtgcaggtcacaggggttatgatggcttagcttgggctcagaggcctgacaccagagagttggccaacaccccggtacagttggccagctgcactagagctgctttgttctcctgatttgaatttcagtggtttcttacagtttttgctgctgctgtagagcatttaagcaggaagggatccagttcagccatccagggactggcacccaagttcttgttgcaggtagcagggaccagcttgcaagcttgaagtgtgcagatggaacacagagcactccagccacccaggcagatatcagaggatgggccctcaggcactggtgaggcccagtcctctccctcagtgacatctgcattcctagcattctgggtttttttgtttttgtttttgtttttgtttgagagagtctcactctgttgcccaggctggagtgcagtggtgcaatctcgactcactgtaacctctgccttccaggttcaagcaattctgctatctcagcctcccgagtagctgggattacaggtgcatgccaccacacccagctaatttttgtatttttagtagagacagggtttcactttgttggtcaggctggtctcaaactcctgacctcaggtgatccacccgtctcggcctcccaaagtgctaggattacaggcatgagtctccgatcccagccctaacattatttttgaacatctgaaatttcaccagattcctgtctgtcacctgggagaggctccctgaggccaggtggaaatcatacccggatgccaccagaatgatgattcagccctttccgtgcttgttccagaggggaagcccatgaaaggaggacagccagtgctctcctgtgtgccacgttccagaagctcaggtctcccaccagcagctggggttgtgggaaagtcttccctgaggccagcccccgggtgcctgggatcagggcctgcttgcctttctggacgagctgggcctgggactggggggggttgctgggctgagacaggggtacctgggtccagtctagatggtgtctgtgacctgcaggggcccctcatgccagggtgctctttacatagagggaatagggtgagaaaatatgaccaacagatgttggagtttactgttatttcccaggaagccatgagaatcctgtgaccctggaaagagacagggttcccaataactagggacatggcagtgagtgatgcagccctgctccctgtcctcaaacagctctaggtccactgtccctaaacagtgacaacacagagtgggcagctttgggatgtggaatgcacaggcggctgcttcgggaattttgatatggggttttagcagctcctgctgcttgctgggaaaaatccctcagggaattgtaatggacttcaggagaaatgacacacaggtgctcgtgtatatgaaataagttgttgttttgttttttgtttgtttttgagacagtctcactctgtcgcgcaggctggagtgcagtggcacgatctcggctcactgcaacctctgcctcccggattcaagcgcttctcctgcctcagcctcccaagtagctgggattacaggtacctgccaccacactcaggtatttttttttttttttgtagttttagtatagacgggattttgccatgttggccatgctgttctcaaactcctgacctcaggtgatccacctgccttggcctcccaaagtgctgggattacaggcgtgagccaccgtgcccagcatgaaataaattttataacctgaataggacccggtaatataggagttaagaagaaattattttaggcagatagtgaaggtaagaaagtccttggtaaggtttttcttttaatgaaaagcaccctccaaatcatatacttttccaacaaacagcagccattaaaatcaagccacagacatagaaaggcaggctagaagcttccacaggtgaatgccagcatttgtgccaataggaaaaggctacctgggactaggcattttcaaaatggcagctccatcttcccttttcctttccaaccacatgcacagtagaaagcagataacatggcatccaccaagtggaaagtccatttgcataataagattagggtggggtggtcagcttcttccagcactatgtaaatgtcacagctgatccaaccaatctgtgggccctatggaaatcagataccacctcttcaaacccgtctataaaatccagtgcactctgctgtaggctggaagtcccattcaggtgctgagagagagagagagagctgttcttctttctctctcttttgcctattaaacccctgctcctaaacccacttcttgtgtccatgtactcgattttcttggtttgagacaatgaaccttgtgtatttaccccagatgatgacgccacattaccagtgtcagcactccccaagaagaaggattgaggcttggtccagtgtgaagcaagtgggccgttaaacacgtggctttggctagtttttgagcatggggctatggtgagggttgctgcctgtgggctggggcttgagtggtttgaacgtccttctgctgccaagacagaaagcacatggtgtgcccagatgtgcattggaggtgactgaggaagggctgggaagctgacaatatccaaaaatctaatgttgttgtcatacagggagataaacagggctactagaaaatagcttatctgaccctttgagaaaatgtagagagaagagtccaacccagggctgtttgaccacaaagtctcaggattgctgagagagggactcttgcatccacagagccctggccctgccccactgccctccctcgaacccagcttctgacaccccctgccccgtcatcatcacccactgctgttttctctacccagcctgactcagctgccctgacagatggggaccaaggccaaggagggccagctgggctcctctcttccaagagatggcaactccagccctgccctcaggaatgtgcttttctccctggcactggctgctctccaggcctaaattcaaccctgtttttagcacagaaaaccaggccaaatgccacacccagtctcagcatacgaagcacctagaactgacactgtgagctctgaactctttgtgtgtgtggggcggggtgagggggagcaacatgcccggacaggtagtcagtgatttttaagaaagatggaggcgagcttatacccagaggatttttccttccagtgtttagtaactgtttggctgtgacttgctaggaagcactcatattacatcagtccaaaagaaagtttaattgaacactgatgaataagacactgtgccatgcacactcttctatttcttttgattctagttgaatgtataagatacccatgttgatgaataaattgattcacaacctgagagtgtcacaatccccatgttggagatcactgctctaccctgcagcttcaggagaggggaggccagaaggcagaatgagaaatggggtcgggggtgtgagtgcttatctcatccacccatgacagcgagtgggcctgcaggactctggaaattgcatgagaatttctgctccatcagcttcctgcctggtctcatgctcccatctcaatcctctcacccaccctcctcccagcagaaggacacacggattttcctgaatcacaatctgatcacttctatcccctgcttaagacctgtctgtagcttgagtacactgagaagaacagttctcaccaaggctcataaggggaggtggacaggggaagcgatggggatggtgggagcttccctggccttcctggacaccccatcctctcagcacctccacatgttcagcaactgggaagttcaactctagtttttcaagagtttttataaagtttggtccttatctcctcgccattgccacttttcttggaagttggtgggtgatactgaaagtttctaccctctaatcctcaaatcttttggtctttgtgatgactggcatgatactgaggctacctggggacccttccctaattcacattttttttttttgagagggagtctcactctgtcacccaggctgaagtgcagtggcatgatctcagctcactgcaacctccgcctcccaggttcaagcaattcttctgcttcagcctcccgagtagctgggattacaagcgcccaccagcatgcccagctaatttttgtatttttcgtagagacggggtttcgtcatgttggccaggctgttctcaaactcctgacctcagatgatccacccgcctcggcctcccaaagtgttgggattacaggtgtgagccaccgcacctggcccctaaatcacatttttagcatgaactcagctggtgtgatctgaaagagtctcatctggaagaacaaaagacattcctatcactcaggaaattccaagtttagcttcatggtaggaacaagagtcaaagaacaaacattttcatgttatagcacacccagtaagccatgggttcatcagattggactctctttgctctgccaaattggcagcatttgtgagttaccaatcccaagggaggactcccactgcagggaggatggcaaaggtcaccactgcgctaaccacccggaataggggtctgaacacttcagccaccgcatcttgggctgcactctgactacactgagcgtggtgaacagaacacccacagccacagccagttcgacaaagcaggttaattacttacagacaggcagcgagggacagcggaagcctaggctgcatgactgttcatctctctgtacgacaagaacattcaatttttggatattgtcagcttcccagcccttcctcagtcacatccagtgcacatctgggcataccatgtgctttctgtcttggcagcagaaggacattcaaactggtctcccggggctcaggagcactgcccagggcagatagagtctcccatgcctgccccacttgcaccacagctgaggactcagcagtgagctctgggttttagatgtggtggacacgccctgggctagtgtggcaggacaccccctctaggagggatgggaatgaggccagggctgtcctgggcagtttctctttagctcaaggtgttgcattctctcggaggaatagaaaccaagcttgggcactttcaggcagttcctccttactcaggatggtgcattcttatataatttggctctgtcttgccacacaaatctcatctcacattgtaatccccatgtgtcaggggaaggatctggtaggtgattggatcatgggggcagttttttccatgctgttctcctgatagtgggggagttctcaggagatctgatggtttaaaagtgtgtagaagttcccggctcgctctctttctctcctgccaccatggaaggcgtgccttgcttttccttcaccctccagcatgattgtacatttcctgaggccaccttggcgtgcagaactatgagtcaattaaacctctttcctttataaattacccagtctcaggtagttttttttagcagtgtgaaaatggactaatacacatttctactgtattctacagtgattctgggaactgtgggcaagaagagaggcgggaaagccagagccatccaatgcttgtcttctggtgccctcctccaggaagccattcctggtgccctgggcgctgctcccagccttgctcaccctgggtcatcaccgtttttggaggggtctgtgtcctccccagactataagacccagaaaagcagggcctggagctaagtcacagtcgtgtccccagcatccactgacacagagtaagtgcatagtgtgtgctaaatgaatgaaagaaaagtgaaagcatgatgaaagccctgtgttcagggtgtgtctcactcaacctgtctgtcctgtcatggtgacttggtgagaattgttgcctgaaggtctttaaagctctctcccttccagggcttccgcatggagctgcttctcagctgtgccctatggggtcagatgcactggggaagaactaaggctcttctccacagcccaccttttgtccccttagccctcccaacataggacacaccatgtccagggctgcaggagcccaggctgtcaacagcatcagcatcctgctagaagagggtagggatggctggtactcagaagagccttctagattcctaagtttattaatcctttcactgcaactactaagaaaaataggtgtgacattattactgggttacacacagtcacacacacacacaaaaagcgaaagcaaaaattgtcaagaatatgtcagcttccctcaggggagtggcttcttcaactttgatcccaaatgacttatttcagaggaaacctctcccctctcctcagaacaaacacattcacacaggaagggattaaattcctgcaaagaagaagaaggaaaaccttccactggtcctttggtcttaactatcctgggccataatgtatttgagagtccagtaatgactgtggatttttttgctcaaaatatcacagatgattgccaaacattgtgaaatgccattgaattgcacacttgaaaacacacacatacacatgaaaacttaagtaaacgcatatacttaattgtgggggctgcagggggggagcggaaagaaacatccagacatctggtggtaaatattctgctctggttcagctaaaaataaagccctttatcagtttggtcactggaaggacttgttcccttcttgttgatgatcagaaaccttagcaggaactaattctcaagtgtctgccttaacagaaaagccacaaagaaacatggtaagagcgtggcagataacatccacggtgctatcgggaggtgacaggtgactgacctcagccttggtgttcaagaagattccagaaggtgggtgacatttaagggaaaaatgaaaaatgaagagggatgggagaattggaggcagaagccagagagacattgtggttcttccaaggaactgtgctaagtcgagggcagtgagagccagggaaggtgtattaatcagggttctctagagggacacaattaatagggttctttagagggacacaatttatatatatatatgagtttattaagtagtattaactcacacaatcacaaggtcccacaataggccatctgcaagctgaggagcaaggaagccagtccatgtcccaaagctgaagaacgtggagtctgatgttcgagggaaggaagcatccagcacgggagaaagacgtaggctggaagctaagccagtctagccttttcacgtttttcttcctgctttatattctggctctgctggcagctgattagacagtgtccacccacgttaagggtgggtctgcctttcccagcccactaatgcaaaagttaatctcctttggcaacacccctacagacacacccaggatcaatactttgcatccttcaatccaatcaagttgacactcagtactaaccatcacagagggtgtgcatgatgtggaggtggacacttggcatccagccaacttcttcaggactttctggtctgcagaggctggaagcttcacactttccttcccagagggccttgcaggtggggttctggatacatttgaatctctggtagcacagtcattgtgtctctgggtgtatccacagtaacatctcacatccaagcaatagctctgaatggctgaaaggctgttccagacacagaaatggcacctgaatcttgagtctcagctcagcagattgttctagcttcattcctggttggcaaaccctggggcctctcctccagcctctcctatgacatggaggctcttaattcactggtctgcatcatacgaaggatcctgccagagcagggattaggctttggtcaacagaagccaccttgcagggagcttctgaaatcccaacatagtgtttggagaaaatgactcacacagactcctccttgtcagccagcagcggacaggcctctggcctggggaaacccggccttccttctacatacctgacatacctgcacacctgaaattccacctcattcctgcctgtttcctagcagggcttccctgagggcagatggaaaggccactccaaatctgccaggagggagattccttctattttttcctggcataaaagggcaagcagtgggggagctgctgacagctggaaatgccaacgtcctccggggtttcacattccgggtttcacattccagaagccaagatctgccagccctgcctgttctctcaccccgcttcctggatccaagcaagacacgggctgaggtactgctgctggtcagtgacgcaggccaggcaagaacccaggtctcctgacctctcacccatgggcttcccaactccccaggcctggtctctctgagaaaggaagacaggccctgttcacagacactcctgaatgatacccaggttctcgggccaggctggcagattttggttcctggaatgtgaaacctctgaggacttggcatttcctgctgtcagcagcttccctacttctattgtacaatagtataatatgatcgaatgatagaatgatattctaccattacgtggaatacacacagttccaataagagtgtcataaacaatctagcacagcattctggttagggcacactgtcccatttcttaatccattttttttttcaattaaaaaataacattgcttatgcccaactgatggttttccatgttatcagcacgtcctaatctgtgtcctggaaaacaacactctaccccacagcaacaaggcatggaggccaatggagaagacagggagatggtgctggaagcagggtctgctcttcccctggggaaggtgcgtgctgagcactctggtatttatcatgagatcatttctgctgcagcctcttcccttgtcgcctgcctccagagagaagcccctgtccatgctccccagaaagatacaggatcttccacacacacagatctgaccacatacatcccctgctgggaataaccctggggagaatggcttgtccataccaggtgtggcctgtgaactcacaaactgaggaaatcctgcagaagctgggaggggcccacagaactgacccaagacagcttcttcccctctgttttttcgtcctgaccccaagatggctcttctgtggggaaatcacacacccgaccctctgaaaaagcacgttaaggaaaaatgtccttgaaaatctcaggagggctgtggaatttctccaccaccagaacttcacagtgacaatgacaccaaacacaagaacgacaataaccaaaatcaggagttttattctcctaccttctctctctctctctctctctctcctctcactgtcatgaacgtcacgaagacactgactttgcattttctactcagcactgcatcaccagtgtctgacacaaagcctgggacatgtgggcttccaagtggacctctcctggataaatgaccattaatgaaacagagaaggagttgaagagcccccagaggagtgtgagtcccaggggtcccgccagctccactcccaccttccaaacctgtgaaagtcaggtgcctgagtcgcacagtctctcccacccgaatgccatgagctgcaggtgagtgagcagttactgcatcctgggccatgggcttgggttgtgaagttaggacctgattagaggatgtcaggggttagcaatgtaccaaggaaagtggagaaagtcatagctcaatgggatcctgtggaatcactgtgtggctgtgtgagtgggggagggcggtaactataggagcatgctgcaccttcctgtttgccaaagagggggcatgtaggacacagaagcggagggtgcaccacttctccctgggttctcaaagtgtctgagatcaaatctactatgacacataccctgcctggctcctttactgcccagcgacccagcctgtctctgcaggagggccagacatgccgtgacatcaccagctcctctaggaatatgggatacaaggagtggctgagatcggctgatcaccagctcactccgctgcagccgccccagagcaatggctccccgaagccgtgttctgggtaaggaggggaggaccccattcccaaccgaacccatctcccatctcagccaccaccagggctcgctccccaccccaaactccctgttccctcattcttgttcccatgcccagccaaatctccaggcgtgaattgctcacagcaattccccatccacagcgcccgggtcagccccatccacagccctgtttcagtttctgaactgcccaaagccataccgagccctggttccacccaatcttcttctaaatgtcagtgccagtcgtatctgtggctgtccactcaccccatcttccccttccctctcccacagctgtcttggccgctttctgtttgtgactctccctgcctccactccccccaccaccccatgaaatgatctcatttggtcatttaaacggaaaactaaaaagttttaagtgactctaggagagcaggagagaggcaggtctcccagctcagaccccgccccgggacggccccacggaagatgcacatctggatgtaggcgctcaaggcaccgcgcgtgcgccgagtggccttgctcagctccgtccttctgaaacccggaatcctcatgtgtctgggtcccgccccatcctggcctcctacaccactggtccagatcctccaccttcccccaacgcgaggtattgacatcaaagcatcacctcatctggcacaagaatctgaaacacagaccgcaccttacaccaacgtagtgaatccctccttggacctgagttcaacaagcccagagtcggggctctgggttcccgcccaaatgccacgcatgcacacagatggcacctggcgtctcctcaaagggacaggaatcccgggcttcccagaatcaccaggtcgatttaaatggcatcagatgaactggaaaagaatgaaagtgctattgcctaaagtgatgaaattttcagaggatgtatcggtcctgtctggtggacagacggccaccagagggaatgaaccagtcttctctgaacatccatgaggatgaagaacagtcactgaggtgacggtaccaagtcaccggccacctcccagggatcctctcatccggtcctcacagcagcgctgcatggtcggacctcatcacccacattccaccaagaggaagctgaagcccagggccttcatccactcatgtcctccagacccctggcacccatcctgggccccaccccatcatccaggccttgggccttcgacctggggagagtccctgtctcctccatgagccgtccagggcctgaagaggtatccaataaacaagaaagcagaacacaaagagctgtgatggagtggatcttatgtagtaagaataaaattattttgagaaattactgggtcatgtatttacccacagaaaaacagaagcaaacacacgcgtgcgcgcacacacacacacacacaccacacaggctgtcacgtgtcctcagcacaaagtgccttgagaaaggccattgctggccccacacttatcctgactgtgatcttgctgtgatcagcacatcccatcagtgtggcaacaggtgtggccagagtgggaaccaggccttttcttcagatttgctctttgttcctgaatagccaccgtcagaacagacaccctcctaggagtcacttgattaaaaatttccttttggatatttaggttgatgttttatccatcggttaaagtataaatgtatatttattataaaagtgtaattatggctctaattaatgattatggtgaattttactaactatagctatgaaaatattccaatagataaaaacagtgctaaaaatgtacagttaatccaagagtggtaactttaagtcttgtaatttttgatctaataaatcttcataaaatatacatgatcatgaagtacatcagtagaattaatcctaatatttacagcaatacttggcgtgctgtctctcataaaaaataacattaatagtaaaaaaaaaaagaagaaatcggccaggcacggtggctcacgcctgtaataccagaactttgggaggccgaggcaggcagatcacaaggtcaggacatcgagaccatcctggctaacacggcaaaaccccgtctctactaaaaatacaaaaaattagcccagcgtggtggcgggtgcctgtagtcccagctactcgggaggctgaggcaggagaatggcatgaacccaggaggcagagcttgcagtgagccgagatcacgccactgcactccagcctgggtgacagagcgagactccatctcaaaaaaataaaaaaataaaatagtaataaagaaatgatgaaatttaaaaattctatttaattttgggttgtttaattttcatttggggcatgactatgtgaagtaataaattttgtttgggcattaatatgggatgacctatgtctccccctaaattcatgtgttgaggtcctaaccccagtatctcagaatataactgtatttggagataaggcctttgaaaaggtgattacagtaaaaggtcatatgagcaggacctaatccaagctgactggtgtccttataagaagaggagattagggcacagacacacactcagcggccatgtgaagacacagggaggaattggccatggataaaccaagggatagaccctcagaaaaaaccatcctgccaacactttgatctcatgcttctgccttccagaactgtgaggaactgaatttctcctgttcaagccacccctctggtgcccttgattatggcagtcctgggggattaacacaggcagaaggaaaatgaaggatgcaagagtcagagaaaggaagaaaatgaaatgtaatttctcctcaaacaattttcaaaataatggactttgggaaaacactttcaggaaattattctaaactgggtgtttgacgttttattctaaactgggtgtttagtgttttaagtgttttgaagtttttactattaatagaactatttgaatagttgaagaggaaacatatttgaaacctgatgatattatgactcctggctaaggttctgtaaccaatggaaagtcttgactgtgagttgtccaggctcttggcatgttaaacaaagaattgaacaaaaatcacaagcaaaacagcggaagaggaagacatagatttattcaagtgaaagtacatgccccagagtgggagtgggctcgagcaagcagctcaagagctctgagtgttggtaacccccctggggtaccatttagaggcctccaattggttgcaccctatgcaaatgaaggatttggtgcgtggccaatcagagactgaagtggagttacatcctatgcaaatgaagattgattggcggccaatcagaggctgaagtgaaggcttggcccatggccatcaaaggctgaagttctccctttggtttaattccaagaagtcagccgtgggttggccttaggctccttgtctccagaccctattctcctgcctcagttccttctttagaatatattactaataactgcctgggaatgatattgccctagacatagacacttgagtgacttcctgcaatgtagccttctaagagagtccatccctacagcatgtccacaggcagtgtgaggcttcaggggtcccctggcagctggcagcactgaagaatgagttcaagcttgaaaattgactgctaatcacagcaacaataaaactattattttttaaaaatctgataacattctagattcatcattttttgccccagtttgttccttggtggtgatattcaccttaagcctcagggtctagagaaaagagaaggtctctcaggaattttagcattagggtaaatcttacaaatggacatttgccagagagtgtagggagcatttggaagcctggcagcagggctgagaggatgagagggataggagagagaagtgagagaggaggcacatactccagggagggcctgggaatgtgctgcatagcagaggcaggaagggtacacagagagagtggacaggttcttgtctggaaacccagagacacagagcacaagatgggtagccagagccggggtttcgccatattgcccaggctggtctccaactcctggcctcaagccatccacccacctcgaccaaactgctgggattacaggtgtgattcacgacgccggcctttttattaatttttaaaccactttttcttcaaatttggactggaaagtgagatgagtcactgagctggccttttgattaattgttttatggaatgcttcatgaatttgggtgttatttaaaccacgtttatgtcaaatttggactggaaagtgagatgtctctaggatacctagagtaaggtcttacttgacggtcgtcagaaaaacacagccaaacctcttcaatattctgttacagctgattggaaaatgctggtgttatcattgttttttctggtctcttcaaagttaaccccactttggaagcaactagagccttgtattgggagagtcctaatctacccatccgcaccactggtggttgtatagtggggacaggtgggcttggaaagtagtggagatttgaacagggctcaggccgtttgggatctcatgttgtaggactagggttcagggaggaatgacacaggctgcttgcactaatacatggtttgtttaacaatggttctgggccctggggtccctgcagaactccctgatttcagcctcctgagggctcattcagacttcttattcagatctgactctgtcaccccaggatatgtttcttacacatttcccagagctctctgtatcccagggtgggaaactctcaagttgcatccatcctcacacaacgagctgccaggatgaatggggctctgtccgtggtgctgaacatgtgcctcgctgtgtgctggtaggtagatgagttgtcaggcaaaggcagaaaacatatgaacatcagaagacaggcgtggagtgaggtgcctcccaccatccacgagtttccattactggtttccttttaagctattcattgggtaacaaatttgcttgtcatcctatatcgccaaagtcattgtagaaaacatctttcacaggcttttcacacaggctaggaagggacactcagaccatgtgtagactgtttgctgagtcaaatgtcatcctctgcctcctggttgattcttttttttttttttttttttttttttttttttgagactgagtctcgctctgtcgcccaggctggagtgcagtggcacgatctctgctcactgcaagctccgcctcccaggttcacaccattctcctgcttcagcctcccaagtagctgggactacaggcacccgccaccacacccggctaattttttggattttttagtagagacggggtttcaccatgttagccaggatggtctcgatctcctgacctcatgatccacccgcctcagcctcccaaagtgctgggattacaggcgtgagccactgggaagtttctcttcattcattcacttctttatagattgtcccttgaggtcttgtgaatccttaatttttcaagactaaatacttccttttctttcgtaacacatagtatctgattttctgggaaactttctatttgacaaaatgggactgggatgtcaacatgaattctccatggaaaggctgatctcactgatttagaatttgtggtggttcttgtggtaagatacctgaagaaaatattgctcttatgtgacattaaaaaagaaaaatgtgacacttaaggtgagtaaaatgaaggtgtgtagttctctgctccctgggcattagtatgtaggaactggatgctagaaaatctttggctttgctttcagcttttggctcggaggaggccaaagtgcacctttcttcggtcgtcccaaatccaggttcatctgacaccagccgcctccaccatgccgctgaagtttgatcccaatgagatcaaagtcatatgcctcaggtgcactgggggtgaagtcggtgccacttctgcgctggcccccaagattagccccctgggtctgtctccaaaaaaggttggtaatgacattgacaaggcaataggtgactggaagggccgtaggattacagtaaaactgaacattcaaaacagacaggcccatattgaggtggcaccttctgcctctgccctgatcatcaaagccctcaaggaaccaccaagagacagaaagaaacagaaaaacattaaacgcagtaggaatatcacttttcatgaggtcgttgacattgctcgacagatgcggcaccaatctttagccagataactctctggaaccattaaagagatccaggggactgcccagtctgtgggctgtgatgttgatggccgccaccctcatgacatcatatatgacatcaacagtggtgctgtggaatgcccagctagttaagaagcacaaaggaaaatatttcaataaaggatcatttggcaactggaaaaaaaaaaagaagaaaatctttggtttcatcttgagggaaaggcaaaagacactgccagccacttccccaacactgtctctgtagatcacgtcactactgtgaaacctaaagaactggcctttgagggatttttcagatttagcacttcagcagactcagggctgtcgcatggtcctgaggctccttgagtattgctcctgcctgttgggcttgttccacccactcggcctggctgcactcagaccacactaccacgtcagatcccacacccaccacaggcaagccgggcatggagtggtgagcggtgtgtcagcaagcgagcatgaggtctggccactgtgcacagccaagcactctggctgctttggtggagtgggcagctccatgagctggcatagatgccatctccatgcaaggccgtggctggcccagatgcaggtgcctgcagcagaagctgcatgtggtacatctggacaaggggaacatggcagtgcctggaagcttggagacaccaagaaccacagagccccaaagagggtgtcacagcctagcttgacaaacccctaggtctccagtcctcaaaaagctgcagcttttctctgcttcttgttactggtaatgtgcagagtgggaggtcatgtttcagccctgttcgtgttacagttctttcaggggctgggacctaagttctttttgcaggtagcagggaccagcctatgtgcgtgaagtgtgcaggtggaacacagagcactccacccacccaggtggatatcagaggatgggcgttcaggcactagtgaggcccaaccctctccctcagtgacatctgcgttcctaatattctttttgaacatctgaaattccaccaaattcctgcctgtcatctgggagagactccttgaggccaggtggaaatcacacccaggtgtcaccaggataatgattcaatctcttctgcacttattccagagggcaagcccacgacaggatgaaatcccaatgctctcctgtgtgccacgttccagaagctcaggttccccagcagcacctggggttgtgggaaagtctttcctgaggccagcctggggcatctgggatcaggggctgcttgcctttctggaggggctcagctcaggactgagggggattctgggctggaacaggagtgcctgagtcccgtccagatggtgtctatgagctgcagggggccctcatgccaggttctttcttacatagaggaaactagggtgacaaaatgtgaccaatgggagttggagtttactcttatttccaaggaagccatgagagtcctgtgaccctggaaagagatggggtccccaataactagggacatggcagtgagtggtgcagcccggcttcctgtcctcaaagagtttcaggcccactgtccctggacagtgacaacccagagtgggcagctctgggatgggggacagacacaggctgcttctttgggaattttgatatggggttttagtggcccctgctgcttgctgggaaaattccccaccttggaattgtaatcgatttcaggagaaatgacacacagttgctcatggatataaaataaattttataaccaaaatagaacccagtgtcagcactccccaagaagaaggattcaggcttggtccagtgtgaagcaagtgggcacttaggcaggtggctttgcctattttttgtgcatgggcccatggtgagggttgctgcatgtgggctgggttttgaggggttcgaatgtctttctgctgtgcagagagggagcacatgctctgcccagatgtgcagtggatgtgactaaggactggaaagctgataatctccaaaactgaatgttcttgccatacagggagatgaaagggctgctagaaaatagcttatctaaccctttgagaaaatgtaaagaaaaggttccaacccaggtgtgtgtgaccgcaaagtctcaggattgctgagacaggggcttttgcatccacggagccccgggttggtcccgctgccctccctcccactcagcctgtgactccctggctctgtcatcatctccctctgctgatttctcttcccagcctgactcagctgccctgagagatcaggaccaaggccaaggacggccagctgggctcctccctccccagagacgccaacccaaccctgccctgaggaatgtgcttctccttggcactggctggtctccagacctaaattcaaccctctttttagcaggctgaatgccaagcccaatctcagcgcccccaggaaggacctaggactgaggctgtgagctctcaacttgtttttttggggcaacaggccagggcagctagccagtgattttaggaaagacgaggtgaacctgtgctcagaggattttttcctcccagtgtttagtaactgtttggctgtgactcactaggaaaagctcatatcacattatttatggcttacacacagcccaaaagaaagtttaattaaacagacgaataagatactgtagcgtgcacattcctctattctttactgatgctagtttaatatctaagatacccatggtgacaaataaattggttcacaacctgaagaagtgtcacaatccccatgttggagatcactgctctaccctgcagctgcaggacaggggaggccagaagtgagagtgagaaatggggtcggggatgtgagtgcttatctcatccacccatgagagcgagtgggcctgcaggactctggaaattgcatgagtatttctgctccatcagcctcctgcctggtctcctgctcccatctcaatcctcccaaccagcctcctcccaacagaaggacacacggactttcctgaatcacaatctgatcacttatatttcctgcttagggcctgcctgtagctcgggtgcactgagaagaaagaccatttctcaccgaggctcataaggggaggtggacaggggaagcgatgggtatggtgggagcttccatggcctccttggactccagatcctttcagcacctccatgtgttcagcagccaggaagttcaattcttcttgttcaggagtttttaggctgggcatggtggctcacacctgtaatcccagcacgttgggaggctaaggcgggtggatcacctgaggtcaagagttcaagaccaccctggccatcatggggaaacctcatctctactaaaaaatacaaaaattagccgggcgtggtggcaggcacctgtaatcccagctactcgggaggctcaggcagggagaattgcttgaacctgggagggggaggttgcagtgagccaagatcgtgccactgcactccagactgggtgacagagcaaaactctgtctcaaaaaaaaaaaagtttttatactttggtctttatcgcctccccatcatcacctttcttggaggttagtgggtgacaccgaaggttccttccctctaatcctcagatcttttggtctttcttctggtgactgccgtgatgctgaggctacctggagaccctaccctaagtcatatttttagcatgagctaatgctgtgtgatctgaaagaggctcattaggaataacaaaagacactcctgtcactcaggatgttccaagttcagcatcataataggaagagggccaaagaacacacattttcatattacagcacacctggtaagccatgggttcatcagactggaccccccttactctgccaaatttgcagcactcatgagttaccaatcccaagggaggactcccactgcagggaggatggcaaaggtcaccactgcgctaaccacccggaataggggtctgaacacttcagccaccgcatcttgggctgcactctgactacactgagcgtggtgaacagaacacccacagccacagccagttcgacaaagcaggttaattacttacagacaggcagcgagggacagcggaagcctaggctgcatgactcactggtcccccgaggctcaggagcacggcccagggcagatagagtctcccgtgcttgccccacttgcaccacagctgaggactcagcagtgagctctgggttttatatgtggtggacacgtcctgggctagtgttacaggagaccccctctggaagggatgggaatgaggccagggctgtcctgggcagtttctctgtagctcaagttgttgcattctctgggaagaatagaaacgaagcccgggcactttcaggcagttcctcctttcttaggatggtgcattctgatatagtttggctctgtgtccccacacaactcttctctcaaattgtaatccccatgtgtcagggaaggggcctggtgggaggtgactggatcatgggggcaatttctctattgttgttctcatgatagtggtcgagttctcacgagatctgatggcttaaaagtgtgtggcagttccctgctccctctctttctctcctgccatcatggaagatgtgccttgccttcccttcaccctctgccatgattgtacatttcctgagacctccttagtcatgaaaaactgaatcaattaaacctcattcctctataaattatccagtttcaggtcattctttatagcaccatgaaaatgaactaacacgcacttctagtgcattctacagtgattctgggaactctgggcaagaagaaaggtgggaaagccagagccatccaatgattgtctcctggtgccctcctccaggaagccatttctggtgccctgggcactgctcccagccttgctcatcctgggtcatcactgtttggagaggtgtctctgtcctccctggactatgaaaaccaggagggcaggacctggaactaagtcacaactgtggccatagaatccactagcacagaggaagtgcacagggtgtattaaatgaatgaatgaaaaaagtgaattgacgatgaaagccctatgttcagggtgtgtctcactcaacctgtctgtcctgtcatggtgacttggtgagacttgttgcctgcaggtctccaaacctccctgtcttccagacagccccagggcttccctgtgaagctgcttctcagctgtgccctacagagtcagatgcatgggggacgctctaaagctggactccacagcccaccttttccccgcttagccctcctaacacaggacacagccacatgcagggctgcaggagcccaggctgccaacagcatcaaccacctgctaggagagggtagggacgggtgagactcagagccttccagcttactacgtttataaatcccttggctgaaactactaggaaaaatagttgtgacttcatcacgtgggttacacacaatcacaaagaaaagggaaagcaaaaattgacaagagtgtgtcagcctccctaaagggaacatctccaaatttggatcccaaatgacttttttcagaggaaccctccttccttctcctcagaacaagcacattcattcacacaggaaggagattaaattcctgtagagcagaggaggaaaaaccttttcacagaggaggttctgtggtcttaactgtcctggggtcataatgtatttgagagtctggaaataattataaagttttttgctcagattatcacggacaattgcgaaatattgtgaaatgccactgaattgcacacttgaaaacacacacacatacacacatgaaaagttaagcaaaaatgtgtatttaactggtggagagtgttggcgggagaacaaaaagaactgtccagacctctggtgctgaatggtctgctctggttcaactaaaaataaagccttcgatcaatttggtcactgaaaagacttgttcacttcctgctgatgatcagaaaccacagcagagacctgatttttgggtgtctgccttaacagaaaagccacaaagaactgtggtgagggcatggcagatgacaaccacagtgctatcaggaggtaacaggtgactgacctcagccttgatgctcgagaagatttcagaggatgggtgacatttaagtaaaagaagaagaatgaagaaggatggggtattgggtgcagaagcaggggtgacgctgtggctctcccaattagctgtgttaagccaagggcagtgagaaccagggagggtgtgcaggatgtgggtgtggacacttggaatccagcctacatcttcaggaccttctgcctgcagaggctggaagcttcacactttccttcccagaggaccttgtagctggggttctggatgcatttgaatctctgggcagcgcagccattgtgtctctcggtgtagccacaggaacatctcatgtccaggtgatggccctgaattgctgagacactattctagccacagaactggcatccggatcttaattgttctagcttcattcctggtggcaaaccctggggcctctcctccagcccctcctatgacatggaggctcttaattcactggtctgcatcatacgaaggatcctgccagagcagggatcaggctttggtcaacagaaaccccccttgcagggagcttctgaaatcccaacattgtgtttggagaaaatgactcacacagacccgtccttgtcagccagcagcagaggggcctccggcctggggaaacccggccttccttctacatacctgcacacctgaaattccacctcattcccacctgtttcctagcagggcttccctgagggcagatggaaaggccactccaaagctgccaggagggagattcctattttttcctggcgtaaaagggcaagcagtgggggagctgctgacagcgggaaatgccagcgtcctccggggtttcacattccagaagccaagatctgccagccctgcccgggagccctgggaacatcagacctgggtgtcttccaggagtgtctgtgaacagagccttcctgcccttcccagaggggccaggcctagggagtttggcagcccttgggtaggaggtcaggagacctgggtcctggcccagcctgtgtcactgacaaccagcagcagaacctcagcccgtgtcctgcttggatccaggaagtgggtgagagaatgatggtgatggtcgtttgaggtcagggtttacatttactgtccagacacctgggatcttctccagacacttgaggacaggcttccactgggaaatcctggtcccacctcacacatctgggtccccaggcagaagacagacccatgcccagacgtggacgctccagagtgggcatgttaggaagggggactccgagggattggtggcgggattggacatggctgtgtgcacagactcttctgacaccttaggaaggtgcagggacagggtttgaacgcagggctgactgaccctaaagcctcctcatgtctaattgggggctcttagtgtccagggagccctggacgggtgcccactggcctcacactgtcccagcctccgaggcctccatgatctgctaaaatctccctctaccttccagatgctgcattgactcagctgctctgagaggccaggaaggagcagctggactcctccctcctcagaggtgcccaccttgcccctgccctggggaaggtgctccactctctcactctggctcatatgcaggcagccttgcctcttcttggtagagacagtaagaccagtgcagggctccactgcagcctcccagaaaatgcctggaaccaaggacctgagaactctacccctttatggaagacatcaaaggggagacatgtcagtggctcttagagaagaaggagatgatcctggaggcttctgtgctcccaagtgtcctcaccatttggctgtgactccctccagaaactagatatctagttctagatatgtgctatgctatcatataataatatcatacgatagaacaatataataatattctatcattacttggaatatacacagtcccaataagagggtcctaaacaggctgggcgcagtggctcacacctgtaatcacagcactttgggaggctgaggtgagcagatcacttgcggtcagaagttcaagaccagcctggcaaatacggtaaaaccccatctctatggagaatacacaaattagccgggtgtgttggcgggcatctgtaatcccagctactcagagactgaggcaggagaatcacttgaacctggcaggcagaggttgcagtgagccaagatcgtgcaactgcactccagcctgggcaactgaacaaggcttcatctcaaaaaaataaataattttttttaaagtgtcataaacagttgagcacagcattctgttgaatgcacactgtcccattttctaacccatttcttcacttaaaaataacattgtttatgcccaagtaaattgattttccatgctactagcacatcctaatctgtgtcctagaaaacactgctgtaccccacagcagcaaggaacagaggccaagggagcagacagggagatggtgctggaagcagggtctgctctgtcgagggagaaggtgggtgctgagcactctggtatttattgaagtcatttctctgcagcctcttcctgtgtctcctgcctccagagagaagcccctatccgtgctccccaggaacacagatgcaggatcttccacacacacaaatctaaccacatccatgccctgctaggagccagccatggtgcctagagggtgacaggtcaccttgcctggcccggaggagaacggcttgtccatgccatgtgtggcctgtgagcttgagcggaggaattcctgcagaagctgggcaggggtaggggggcacagaactgacccaaaacagctccttcccctctgtcctcacatcctgaccccaagatggctcttctcagggaaaatcacaacccaaccctctgaaaaagcacattaaggaaaaacacctttgagaatctcagggggggatgtggaatttctccaccagaacttcacagtgataatgacaccaaacacaagaacgacaataaccaaaatcaggagttttattctcctaccttctctctctctctctctcctctcactgtcatgaacgtcacgaagacactgactttgcgttttctactcagcactgcatcactggtgtctgacacgaagcctgggacatgtaggctcccaagtggacctgtcctgggtaaatgaccattaatgagacagagaaggagatgaagagcccccagaggagtgttgagtcccaggggtcccgccagctccactcccaccttccaaacctgtgaaagtcaggtgcctgagtcacacagtctctcccacctgaatgccatgagctgcaggtgactgagaagttactggattcttgaccatgtgtttcggttgtgaggttgggacctaatgggaccctttgaaatgatgtcatgggttagcaatgtcccaaggaaactgaggaaagtcatagctcagtaggatcctgtggaatcgctgtgtggacatgtgagtgtcggagagtgttaatgccaggagcatcctgaaccttcctattttccagaggactcagtgtgggggacgattggggcacatagcacagagaaggtggagggtgtaccgcttctctcctgattacaaaggtgagatcaaagctacaatgacacgtaccctgcctggcacctctcctgcccaaggacccagcctgtctctgcaggacttgcaggagggcaggaaatgccatgacatcaccagctccactagaaatatgggataaaaggagtggctgagatctgctgatcccctcctcactccactgcaaccacccagagccatggctccccgaggctgcatcgtaggtaaggaggacaggaccccattcccacctgagcccatctccaatctcagccaccaccagggctctctccctaccccaaactacacctcatccctgttcccatgcccagccaaatctccaggcgtgaattgctcacagcaattccccatccatagtgcccagatcagccccatccacagccctgtttcagtccctgagctgctcaaagccataccgagccctggttccacccagtcttcttctaaatgtcagtgccagtcatatctgtggctgtccactcaccccatcttccctttccctttcccacagctgtctttgccattttctgcatctccaggctcctctgctcacacggagccccaggtgagcccaggagtgtttgggaagctggaggaggggtacaccttccaggggaccccaggctgggacccacctgccactacctcctggatctcaccagctctgtctcctccagtggcccccatgactccttacctgatgctgtgccagccacacaagagatgtggggacaagttctacgaccccctgcagcactgttgctatgatgatgccgtcgtgcccttggccaggacccagacgtgtggaaactgcaccttcagagtctgctttgagcagtgctgcccctggaccttcatggtgaagctgataaaccagaactgcgactcagcccggacctcggatgacaggctttgtcgcaggtgagtcctgtcccctccgtgggattgtgggtgcagggtagctgcatgcctgttctgccctgggtggagcccccattctccttgtctccctgtctctgccccctgcttctattcaatccacctctccctttccctacacctgtgtctccatccatttttatttccctctcagaatctcactctctctaccccgctgtcctctcctcctggctctcctgtcctcatttctgcccatgttcagtctcgcccccatctctggccatctctgtcccgctcagtgtctctctctgtcactatctccagtgtcagctaatggaacatcaggggaacgatgactcctggattctccttcctgggtgggcctggagaaagaggctggtgttacctgagatctgggatgctgagtggctgtttgggggccagagaaacacacactcaactgcccacttcattctgtgacctgtctgaggcccaccctgcagctgccctgaggaggcccacaggtccccttctagaattctggacagcatgagatgcgtgtgctgatgggggcccagggactctgaaccctcctgatgacccctatggccaacatcaacccggcaccaccccaaggctggctggggaacccttcacccttctgtgagattttccatcatctcaagttctcttctatccaggagcaaagcacaggatcataataaatttatgtactttataaatgaatgctgtagaattcatgaattagagagcttggactgttgaaaggggtcacagagggtgacgtggggccccttctctctgtcaccctgaggcatctgggcctttccatttgttctgttcgtgcacacacttattttctctttttccatttatttttaaatttattattttgttatttgtgctcggtgactaggaccctggccgcacctgggacaggggccaccctcctacaccagcctccaccaccccatggctccctgaacccagtcacaacatcgggagcagcccaggtggggtggggaggaggtggggatcgcgagagggcttcggagaggcactccctctcccaccagttctgggacagaacaggacccggctgtttgttcttgatgtacgttaaggagatgcagacagactgggaaagaacggaggttctttctccaactggctatggggagaaggtcagagtagcttaccagaccaactcaaagctacaaacttctttttctagtgcttatatgcattctaagctccacgcctatgtgcggagtgcacctgcaagacagcgtgtttcattcttatcaatatctaatctttaactagtgtccagggtctggaaagctttctccagagtcttggaaagtttcttaatcttaaatggaccccagtatgaggaatatgtggaagaatgctattattatttgatcagattttagggtctgagaaaacccagctggggttttaatgggcttgttttctcattcccgccctcatccccaggcactagtttatccagttctataatgtttaaggtatgcattcatcaaaaataaagtttagtggaaactgactcttctggtcgctaacagaaacctgatctgccacacacccatcccaggcacgcgtcccctgggatcgtggaaaacccactgggcaggtccaacgcccagagatgccacacttagtctgactttgggccaaagctggagcctgagagggagtgggtggggcggggtgtggaggatgtgggctatggaggagccctcgggtttggaaggaggaagcaaaggctggccaaggcacctgaagcacattcttcaggccctgtgccagggacaaaccctcgtggccagtgctgatgtggaatagatcgcagggagggggccacgctgctgcttacccaacccagaagcaggttccttagggagcgttcagccctagggtctccaccaacctggattccccaaagtcaaagaagccaccacctttctgggtcctgtttctcagggccagggggtctgcacagggcctgcgtccctgggcctcagtcatccgaggccaacccaggctcccggactgcccgatggcttccctgggcagattctgactcaaagggttccatcatcgccccacagttggcagcctcgcctcagtggccccagacgggcccggtggccaggtgtctgcacgtgcgggaactctggacccggcacatcaccatggcagcaatctggcatcacagggcaaatgccctgtctcacaggcctaaccctagctcagggcctatcagtgggagcacacccaatgctgggtgagctctgcctccccatgctaggattctgcagggcgtgagagctgtgctggcgcctagaaagcgacagacccaccccacccacggggtggctgcttcctcatcctccacagtgagcgtcctaaaccttcaccctgtccacatgtgactctccttgcctgcactccccccaccaccccatgaaatgatctcatttggtcatttaagtggaaaactaaaaagttttaagtgactccgtgagagcaggagagaggcgggtctcccagctcagaccccgccctggacgcccccactgaagccgcacagcaggatgtaggtgcccaaggcacctacacgcgccgagaggcctcgctcagccccgcccttcttaaacctggaatcctcaggtgtctgggtcctgccccatacaggccccctagaccactggtccagatccccaaccttcccccaacacgaggtattgacatcaaagcatcacctcatctggcacaagaatctgaaacacagaccgcaccttacaccaatgtagtgaatccctccttggatctcagtccaacaagcccagagtcggggctctgggttcccgcccaaatgccacgtgtgcgcacagaaggcacctgacgtcccttctaagggacaggaatctcaggcatcccagaatcactaggtctgatttaaatagcgtcaaataaattggaaaagaatgaaagtgctataaagttcggctgaaattttcagaggttttattggttgtatctggtggagagagtgggcaagtcttctctgaacatccatgaggacgaagaacagtcactgaggtgacggtaccaagtcaccggccacctcccagggatcctctcatccggtcctcacagcagcgctgcatggtcggacctcatcacccacattccaccaagaggaagctgaagcccggggccttcatccactcatgtcctccagacccctggcacccatcctgggccccaccccatcatccaggccttgggccttcgacctggggagagtccctgtctcctccatgagccgccctgggcctgaagaggtatccaataaacaagaaagcagaacacaaagagctgtgatggagtggatcttatgtagtaagaataaacttattttgagaaatttctgggtcatgtatttacccacagaaaaacagaagcaaacacacacacacacacacgcacacacacacacacacacaccacacaggctgtcacgtgtcctaagcacaaagtgccttgagcaaggccattgctggccccacacttatcctgactgtgatcttgctgtgatcagcacatcccatcagtgtggcaacaggtgtggccagagtgggaaccaggccttttcttcagatttgctctttgttcctgaatagccaccgtcagaacagacaccctcctagaagtcacttgattaaaaatttccttttggatatttaggttgatgttttatccatcggttaaagtataaatgtatatttattataaaagtgtaattatggctctaattaatgattatggtgaattttaataactatagctatgaaaatattccaatagataaaaacagtgctaaaatatacagttaatataagagtgattactttaagataaatcttgtaatttttgatctaataaatcttcataaaatatacatgatcatgaagcacatcaatagaattaatcctaatatttatagcaatacttggcgtgctctctctcataaaaaataacattaatagtaaaaaaaaaaaaaagaaacaaagaaatcggctgggcatggtggctcatgcctgtaatcccagtactttgggaggctgaggcaggcagatcacgaggtcaggagatcaagaccattctggctaacatggtgaaaccccgtctctactaaaaatacaaaaaaggagccgggtgtggtggcgggcgcctgtagtcccagctactcaggagctgaggcaggagaatggcatgaacccaggaggtggcgctggtagtgagctgagatcatgccactgtcctccagcctgggcaacagagtgagactccatctcaaaaaataataataataataataaagaaatgatgaaatttaaaaattctatttaattttgggttgtttaattttcatttggggcatgactatgtgaagtaataaattttgtttgggcattaatatgggatgacctatgtctcccgcaaaattcatgtgttgaagtcctaaccccagtatctctgaatataactgtatttggagataaggtctttgaaaaggcgattacggtaaaatgaggtcatatgagcaggacctaatccaagctgactggtgtccctataagaagaggatattagggcacagacacacacacagaggccatgtgaagacacagggaggagttggccatggataagccaagagatagaccctcagaagaaaccatcctgccaacaccttgatctcatacttctggcttccagaactgtgaggaactgaatttctcctgttcaagccacccctctggtgcccttgattatggcagtcctgggggattaacacaggcagaaggaaaatgaaggatgcaagagtcagagaaaggaagaaatcaaatgtactttctcctcatacaattttcaaaatttcagttactttaggaaaacactttttgggaaattattctaaactgggtgtttggcgttttattctaaactaggtgtttagtgactagatactttcttttctttcataacacatggtatctgattttctgggaaactttctatttgacaagtgtgtgatcagggatctctacatgaattctccacagaaagactgatctcatggatctagaatttgcagtggttcttgtgattagatacctgaaggaaatattgctcttatgtgacattaaagaagaaaaatatgacacttacggcaagtaaaaagacggcgtgtggttctatacgcttgtctggggcttttattgtctgcaccctttggcctttttgagttgccagcttctccaggtcctccagcttctcatgagttgcatctaggatatatgaggcaaaaaagaaaactcagggaaactccctgctctgccatttctgtggtcccaaggtcctcccttcgtctgccttcttaccctacctttctgagtcttcttatgcttgttttatagctgtactgagcaggagagatatggaaacatatgcctacctcgtctttctggaagcagaattccactcctactgaagggttttggtaagaacacatttgccagatcaataattgcctaccaaggatcaaacactgttttgatttgccccaataaagatacaacatctggcacagcatctgtggttggggcacagtctagctctggttttgaaaacttacaaatacctgcccttgtctgtgatacagtttggatgtttgtcccctccaactctcatgttaaaatgtgatctccaatgttggaggtgaggcctggggaggtgttttggtcatgggaggagattcctcacaaatggcttggtgccctccccatagtaataagtgagttctcaccctgttggtttgtgcaagagctggtaacaagagtctgacatttctcttgctccctgtcttgccatgtgacatgcctgctcttcctttgccttctgccataattgtaagcttcctgaggccctcactagaagcagatgcaggcaccatgcttcctgtatacagcttatagaaccacgagccaattaaatctcttttctttataaattacccagccttggtatttctttctagcaatgcaaatggactaatgtagtcgctttatgaggggtcagaacgtgaattgcatgaggacatgatgatagtgcccattatccctgaatttttcacatcatgcaattcaccttctgggccccatataggggaagtgattctggaaaatgtggttcccatctcagaagggagtgggtgttggggacaaggtgataatagaaagtctagcacagtccaccccattcaaagataagcatgtattgacacccattatagccattttcaacttcaaaataaaggcagcaacaataccattttccaagtaatgtgatgcaactatcagttttaccacccaaagacttttaatcttctctagagaagaggggtttgaaaatgcattgtccatctcccagatgattaacaacctctcttactatttcatactgtaaataccaagaatcaaacaatataaaccaatacttgatagaggagtatgaaggcattgagacaaacagcaacggaatcagttaacatagaaaatattcacataggccaggcatgttggctcatgtctgtaatcccagcactttgggaggccaaggcagaaggatcgcttgagtccaggagttcgagaccaacctgggcaacacggtgaaaccccatctctccaaaaaataaaaaaagaaattagccaggcatggtggtacacgcctgtagtcccagctactcagggggctgaggcgggtggatcacttgagcctcgaaggtaaaggttgcagtgagccgagatcacgcctctgcactcctgtctgcatgacagagtgagaccctgtctgaaaaaaagaaaaaaataaataaaatatgttcacctcaaagtgaggaagattatataaaagtccaacttagtccttgtttcagcagctggcctagaggctaaagctggcatttaaaaatttcctctttcaagccagacacagtggcacatgcttgtaattcccacgactcaggtggctgaggtaggaggctcacttgagttcaggatttcaagaccagcctgggcaacatagcaaaactccacccgaaaaaaaaatgtttttcactccattctataatctctttgctctcagcaaccacctcatctgattgtgattttttttttttgttttttaatgactatattgtcttctcttcatccttacatgaatcaccctctccctctctccccgaaaaaatcaatcattccattgttagaatgcagtttagggtctataaactccaaactcagtacataattaaaatttatatttgcactttgggaggccgaggtgggcggatcacgaggtcatgagatcgagaccatcttggccaacatggtgaaaccccatctctactaaaaatacaaaaattagctgggcatggtggcacgtgcctgtagtcccagctattcgggaggctgaggcaggagaatcgcttgaacctgggaggcggaggttgcagtgagccgagatcgagccactgctctccagcctgggtgacagagcgagactccatctcaaaaaaaaaaaaatgtatattcattgggaccttgaactcagtcttcaagttttacatgcagtaccattagtttaagttcagttgattcactgtctttctgtctccttccacaaaccaacctcttgcatcagatgttctccttaacttgcttagagtgctgccattttttgaatttttttccactttatcacctgaaacctcatttccatcttaagtaggcctcccatgcattgtctaagtatctccctagtaattcccaacattttcttgtcccaactgcagcctagttctctctttaatagaattgttttacatccctctcttgttgtagatatgatttctctacaactccatatatgaaaaagataaggtgaatagaggatattgtgagcaactcagtttcccttgccacttcccagattggtagtccaaccccttctctgtgtctattccctccagccatgctattctttatttattcttgtggcctccttgtatattcacagaggactttgctttgctctggttgtgatttttaacctggtgaaattacccacgtcttcattcttgaagtatatatgccattaggagtcttttctgtaatgaattgttatagttttcccatgttttactatgggacgtgggagttctaagaggcatcccacagaatgccttgtgtgagtggtatagttatactctcttctgcccattgtgtggtagctacccaattccccccttgataatcaggacaatttgccacttttggccattaggctttacacaatttcttctaccttagactatataaccattcaattagagccaggttaatgccttctacttccaaagtccacatctctggagtcaacagcaagaacattccctgccaaggactactccagatttctgcatgcttaacccaaagcaaaaataagaccttttgaattaagggtgtttatatcattaatcttcatcatatgcaatgttgagttttttttgcaaagcagattcctggttaaattttttcagagcatcaaattccttctggtgtaacaatatattatttgcaccaattttacctgtatagcaactacttttcattcttatcttataaaacttatcatttggtaaaaaaaaattctcacttttcctgaatttcctgttggttccttgtaatatcttccatctaggtctttcaacagggtgagtttcatattgataaggagttcaggaagggagttatcgaaagataaagtaagtgcactggcattttctccttgagaggctgggtaagtcaacaatagattagacctatggaatatgagaaacagcaggctgtccctacaaggtgggagactgttgacagctatgctgagcctaaggaaaagaagacagccatgaactgtgttcagaattaatttgccccgacagaaaatagaggcagggaaaatcaagatacagtactctggaatgtgcatttccatgtcattctcatgaatggtacagtctaactaagttcagtcattttctcagtacaaattctgattcttgctctctctggttgcatctacttggcgagctgccctgggcatgtcgtttagctatctctatttcgttttcatacctcccatacagtgccatggagtccttgtgtctcccttgtggccacacagaatgttcagacaatgagcttaatcacttgatttctactacttaaacagacaactcttgaaatcaatttggaatgttttttgctccaccaagtattgcaagacgttagcaaagatctcagctaggtgccctttattagaaagccatcatacaaatatttgaaaagattcaattctggcaattctggggagtcgtctccattttacagctgcttctctttacttggggaaggtataagtaaattacaccttccccgagcatctcagggagacactcaggggaatcccctctggcttccccgactctgtgttatcagttaagaagcgcatgaacattattatgcattgtgtaatgatatggtttcactgtgtccccaccaaaatctcatcttgaattgtagctccaataactcccacatgttgtaggagggacccggtgggagatcattgaatccttggggcagtttccccatataagacttattcttgcggtagtgaataagtctcgcgagatctgatggctttatacgtggtttcccctttctctcggctctttctctctttgcctgccaccacctaagacatacctttgctcttccttcgtcttccaccatgactgtgcggcctccccagccatgtggaactgtgagtccattaaacccctttcctttataaattaccctggtctcagctatgtctttattagcagcatgggaacagactaatacgtgtaatattgctatcggcatttatctaacaatgatatagctctaagcaggtgttctgtgttcttactacacactattttcgctacagtgaagctgtatacctgttgattccccatctggcccattgcagccagatttttctaccactggcaggctacaccttggctcactacaagtcaatgtgttttgtatttttctctagccatatatggtttcaaagatgtaggaagagtataggtggagaactggatttagataaggctgtggttttcctaaatgagtcttaccaaacagtggggagacaaaggacaatggaaatcagcaggctgtaattataatgattaagcaaggaatctaaggtagataaacaagtgttatgaaagccgtcttgaatcagaagtcaggctggtcgcggtggctcatgcttataatcccagcactttgggaggccaaggcaggtggattacttgaggtcaggagtttgagaccagcctggccgacatggtgaaaccccgtctctacaaaaatacaaaaactagctgggcatggtgacatgtgcctgtaatcacagctacttgggaggatgaggcaggagaatcacttgaacccaggaggtagaggttgcagtgagccgggatggaaccactgaactccagcctgggcaagggacccagactccatctcaaaaaaaaaaaaaaaaaaaaaatggccgggcgcagtggctcacgcctgtaatcccagcactttgggaggctgaggcgggtggatcacgaggtcaggagatcgagatcatcttggccaacatggtaaaaccctgtctctactgaaatacaaaaaattagctgggcgtggtggcgcatgcttgtagtcccagctgctcgggaggctgaggcaggagaatcgcttgaacccaggaggtggaggttgcagtgagctgagattgcgccatagcactccagcctggtgacagagcaagactccatcaaaaaaaaaaaaaaaaaaaaaaaagccgtcttcaatcagaagtcacatatgaagagataagaattcaaaacatcttagaattcacattccaaatagcttaaatggaactgggttattaagaaagagggctagaaacataaaatgtactaatgaactcatctaaataaaggaataatgtggttaacaaggcaggctatttcaataaaaaacaattgcctgaatggccaaatctgttgcctgggcaacagagcaagaccgtgtctcaaaaaacaaagcaagcaaacaaaacaagacctactcaagcccaatcctatctctaaaacaattctgtgcccctattctctccttgccagtcttccttatcttccttcctccttcctaatcaccttaatcttaatcatggttaatctttaacagctgctccatccttttcccaaccggtaaacttcaccacattcttagaatcctaaacgacgttccccccattcctatttttctgagagtttttatcatgaatgggtgttaaattttgtcagatgcttcttcagcatcaattgatgtggtcatgttatttttcttcttttgcgtgttaatacggtgcattccattgatagtgatttttgaaatattctgccaggcctacattctagaataaagcctaatagtcatggtgtgtaattattttttatattgctgaatttcatttacaaatattttgtcaagaatttatttttcttttttttaaaaatggagtctccctctcgcccaggctggagtgcagtgatgtgatctcggctcactgcaacttccgcctcttgagttcaagcgattctcctgcctcagcctcgtgagtagctgggattacaggcgtgcaccaccacacccagctaattttttgtattttcagtagagatgaggtttcaccatgttggccaggctggtctcaaactcctgacctcaggtgatctgcccgccttggcctcccaaagtgctgggattacaggcgtgagccaccgtgcccaaccaaggatttttgtatgagggatactcatctatagttttattgcttggttgttgtcattgttctttgtctttttatggttttggtaacagagtaatttgatttcacaaaataaattgggaagtattccttcctattctattctctggatgagatggtacagaactggtgttaatttccctttaaacatttggtagatcctcaagtcgaccatctgggcttggagatttcttttttaggaaatattttaaattctaaattcaatttccttaatagttataaggctactaaaatgatatatttcatattgggtgtgttgtgctcatttgtgcttttaagtgggtggtccatttaatctaagttgtccaattgtgtagagttattcctagttttccattattaatcttttagtgtctgcaaaacctatagtgctatctcctgtctcattattgatattgataatttgtgtcttctgtttttgatagttttgccaaaaatttatacattattgatattttgaaagaattaactctttatttcattgattttctatactgtttttctgttttcaattttcatgacccctgctttcctctttattatttccttccttctccttgctttggtttattttgctctcttatttttttctaggttcttgctgtgggagcttagattattgatttttcctttccttccttccttctttcctttctttccttttctttcctttcctttcctttccttttctttcctttcctttcctttcctttcctttccttttctttcctttcctttcctttcctttcctttcctttcctttcctttcctttcctttcctttccttttctttcctttccttgtcttgtcttttcttttctcttcttttctttttttcttggagtttcactcttgtcgcccattctggagtgtagtggcacgatgcaacctccgcctcttgggttccagcaattctcctgcctcagcctcccgagtacctgggactacaagcacccgccaccatgcccggctaatttttgtatttttggtagagatggggtttcaccatgttggccaggctggtcttgaactcctgatcccaggtgatccacctgccttggcctcccaaagtgcagggattacagtcttgagccactgtgccttacctgattgttccttttttctaatacaactatttagtgcaataagtttcacacttagcactgctttatatatgttccacaaattttgatatattgtattttcatttcattaagttaaatatacttttaaaaatctttgagactcatctttaaaccatgagttatttagagttgtgttgcttagcttccaagtgcttggagatctttctgtaatcgttagtttgatcaaattatggtcagagaacacactctgttaaatttcaaaattttagaacttgttgaggtttgttttatggctctagatagaagtcaattctccattaccatttacaatgacatcaaaaataacaaatacctagaattaaatctaaagaaaggtgagagacctctacaaaactctgctgaaagatgttagagaagacctaaacaaatgggaaataaaccatatttatgctttggaagactcaatgtaataaagatgtcaatgttccccaaattgatctatatattcaaggcaaactcaacaaatattacagcaagattttgtataagttaacaaactgattctaaaatttatcagaaaatgatggccaggtgtggtggctcacacatgtaatcctagcactttgggaggccatggcaggaggatcacttgagcccaggagttcaagactagcctgggcaacacagtgacaccctgactctacttgcacaaatttaaaaaaaaaggatcagaaaatgaaaatgacagaaaatgaaaatgacaatacaatattgaagaaactaaacaaagttataggacttacactaacagatcaggaatttttatgaaattataataatttagggtgtggtattgtataaggtaaacaaatttatcaatggaaaaaaacagagttcagacacagatccacacatagacaatcagtgatttgtgacaaatgtaccactacaactcaccaggcagacattagtccttttaatagatatctatatggggggaatgtatcttgacccttatgtcacaccaaatgtgaaaattaatttgaaatggatcatagacttaaaagcaaaagatttcaaactataaagcaggatttccaaaagccagtgtgaagagcatgggcgccctcctcccagcaaaacaaccatttaactggtgaaaaaaaatttttaataaaaacaactaattaagtctctggaaattgtccttagggcatatcgcaaacgaagaaatgtttattcaagaaattctgttagccaggtgcggtggctcacacctgtaatcccaacactttgggaggctgaggagagcagatcacctgaggtcgggagttcgagaccagcctgaccaacatggagaaaccccgtttctactaaaaatacaaaattagccgggtgtggtggcgcatgcctgtaatcccagctacttcggaggctgaggcaggagaatcccttgaaccttggaggcagaggttgcagtgagccaagatcacgccacagcactccagcctgatgacagagcaagactctgtctcaaaaaaaaaaaaaaaaaaaaagaaagaaagaaaaagaaaaagacattatactcaatctgtaaacagcagcaagagtctgagggcatttaagccacacattactcctattccccacatccccagccaactctgtaattgaagctctattatggtcagtcacagtcaagaaaatgggactccacctctccccagctcccagcctagggctacagtttcagttcagaaagggcagtgcaccagcatcttttatcctgctgtctccatgttgcggatgtgctatattagttagaaattgtggcttgcagcaccggggctccttctcccatccagcccctcctcctagcgtggaagttccacgccaggtttagcaggtcaagcacactgggcttcactgatcctgcctgagttcactcatggggcagaggttccacacaagaaagggcaaaccgagaagacgaacagctaccaccccctcccagtgttctagctgtagaggaaagacatcaccgcaggagaagctagctgctgtccctgacaccagctccagtccagcggctcagtggttctgcccgggggagagggaggccatcagaacagagagctccacaagtatccctaaaactggctttacttgaaataagagtgtggagaagttgatgcttaatgacattgaaaaaataaaaaaggaaattttggtgctgaaaaaccaaaaaagggcttgcagtagcaacaacaaacaaaaagacaaggcagaagcttaacagagataatcagaaaaagagataactaagaagggccctcctggagtgagagacagcctcaaaccctggcaacactctgacttggcaaagaagctagactttaatcagcccacaaaatgatttatgcattgtgctataggcctattaaaaagaatagagcaatcaattaacaataagaggagtctaacagatgcaagtgataccaacagaggcagacaagccagaagcttaacagaaacatcaaggaaaggacagtcaaaaagaggccagcttatgccataactatctggagtagttagagagacagtgcgtatgcttagggctgcaccctctggagagcactaagaaaggtataattgttcatatgtaattatgtaattattacttgtatgcatgttatataattattgcttatatgtaattgtgtaattacttataaaaacagcataatcgcttatttcttaccctttctccccttaactggttttaaaagtcatggcatgaaacaatatgtatgtaattgtattgctgggaaaaataaagaatctgatttttaaatgggcaagaggtctgaatagccatgtattaaaggaagacatacaaatagtcaacggatatatgaaaaaatgttcaacaacacttatcatcagggaaatgcaaatcaaaaccacactgagatgtcccacttcggttaaaatggcttttatcaaaaagacaaagaataacagatgctggcaaggatgcagagaaaggggaatgctcatatactggaaatgcccctccagacccagacagtaaaatttacaaaacatttagagaagaattaataccaatcattcacaaacttttcaaaaaagtcaaacagaactttccaatttactctgaggtctgtattaccctaacaccaaaatcaaagatatcacaagaaattaaaaagaaaaaactacagaccaacatctcttatgaatataaattcaaaaatcctcaacaaaatatagcaaaccaaatccagcagcatatataaagaatgatatatcagccgggcacagtggctcacacctgtaatcccagcactttgggaggccaaggtgggtggatcacggggtcgggagatcgagaccatcctggctaacatggtgaaacctcgtctctactaaaaatacaaaaaattagcccggcatggtggcacgctcctgtagtcccagctacttgggaggctgaggcaggagaattgcttgaacccgggaggtggagattgcagtgagccaagatcgtaccactgcactccagtctgggtgacagagcgagactccgaaaaaaaaaaaaaaaaaaaaacaatgatacatcatgaccaagtgggatttatcccggggatgcagttggttcaacataagaaaatcaatcaatataatataccatattactagactatagaggaagtcacgtaattctctcaaatgatattgaaagagcatttgacaaaatctacactctttcatgataaagtacaaagaacaaactaggaacagaagagagcttcctcaacctgttaaagagcatctacaataaactcatagctaacatcatacttaattgtgaaagattgaatgctctccccctaacatcaggaacaggataagtatattcactcttaccactctattcaacatagctctggaggttcaagccaggaaagttaggcaagaagagaaaatgcattcagattgagcaagatgaagtaaaatggtttctatttgcaaatgacatgatcttgtatgttaaaaatccttagggccaggtactgtagctcatgcctgtaatcccagcattttgggaggccaagtggggagaatcacttgaggccaggagtttcaagccaccctggtcaacacaatgaaaccctgtctctacaaaaacaaaaaataaacaaaattaaaaaattataagtacctgaggtgatagatagcgtaattaactggatttaatcattcaacaagttaagcctacattaaatcatcacattttacccaatgtgaataaacaattattctttgtcaatttcctaaaaaaattcctagcagaaaacgtggaagtaaatcttgatgacctcaagttaggtaatattttcttagatattacaccaaaaacacaagagacaaaaggaagaatagacctcatcaaaaattaaaaacctatgcactgcaagcatcaaggaaatgaagacaatccacataatgagagaagtgtttgcaaatcatgtatttgataagggatgagtatccagaatatattttaaaactcttacaactatataataataaaataagcaacccaattaaaacatggaaaaaatctgaataaacttttttcaaaaaggaatacaaatggccaataagcacatggaaaagatattcagcgtcattattcattaaggaaatgcaaattaaaactacacaggatatcatacgcacccacccagatgactgtaataaacaggaaaatagaaaataacaaaggttgaagaatctggagagaaatgtgagccctcatacactgctgatgggaatgtaattgatgcggctctgtggaaaacagtttgccaattcctcaaaaacttaaacagaattaccatgtggcgcagcaattccactcctacatgtacaccccaaaataattgaaaacaggttctcaagcaaatacatgtatatgtatgttcataacagcactattcacaacagcccaagtgtccatcaacagatgaatggataaatgaatgctgatacatggatacaattgaatttattcagttataaaaaggaatgaaatactaataaattctacaatggggatacaattgtagaaattgtaacaatgaaaacaataaacaaagtaaaaaaaaagaaggtgacacaaaagttcacatatggtgtgattccatttatatgaaatgtcccagataggtaaatccatacagatggaaagccgactggtagttgccaagggtgagggtagaggggaaggggaggaacagctaagtaggcatacagtggtcgggggctgtggagccaggtgactcggagctaaaaagcaattctggaagatgactgagctactcttctttcaacttgagagaggaagagaaggaaggagaggagggaaaagacagggaggggaagagaggagagtggggcagtggagggggagagagagagagagagagattgatggttgcgcaaaaagaagctagtgaacacagcaggcattgctcaccttgatggaatacacacaacaaaactctgtccaccgcctgggctgcccttacttgagcacactcctggggtagtcaggcctcactcctgggacatggagcctcactactgcctggtgctgagagcccaggggctccagtcagcagtgctggaagcagggccagaagtgcagttaggaccacagagctgggtcttgttcaaggacaggatgatccccttattacagccccaagagattgcagatctggtctccactctggagtgtcaactggcacaaccacagtccaatatctggaagagtcagagctgatgagctgacaggggacctctgggagcccccaaccctatccacagtgctataatcctccctcctctcttctccctccgctcaccacaccccttctcatctgtggtcccttctgagtctgagcccaggagttcaaaaacaaagatcagctgagagcagaaggagaatgacaatgtttctggggtcaccggatcatgatcattggggcacaagatgatgtctctgagtttctttggttgctgtaacagctcacagtggattttgggactgactctggatgtaggtcctggggactgggcttggcaggtgaggaaatgcagggagggctctggaaagggttaagcttctggaatttgcaggtggggagagagattgcaatgcagtcagagaggacacgggtgattatgaggtgggaaaccgagaattaaacagaaaagagaaaattaagtttgaagttcagaggtaccttagggataacattaggcattagctcagcttggggctggggatgacttaccgaagattctgggcaccatggtttaggcttcagagcagcagatgagagagcagcagtggaaatgggtcagtgactttacacaggagattattatagggtatgaacttacccatatttagggaggtgtgcagaaggagtggtttcttaaaaagggtggggcatgaaaagccacagaaagcataacaaaataaaagcattgacacattagtaggatgctactggacctgttccagggctgtcatgttctcagacagctcaaaactcagggcatgaaggacattttctccggtattcactgtgagaacctcatagggttcctggaggtaaaactcttagaaaagtgcagaggctccccttagactgggccccctggaatttttaattctcagattgctccaccctgagcctccaggaattcattcgttagacttcatgttttcctatcctggtactggttcccacaggggtttctggtcatgggtttctgttgcagtagttttgattctctgtatccacctgcctgtgtcaacaaatcttagggcagtggtttgccctgtgaccccactcctctaatggatataagaagaagtgttaattgtttctttgttcagtattcactttctgttaagatggagtgatgagttccaagtttcttacatgcttgactggaaactggaagtcccagagaacatttctttagagatgaggtctcactatgttgcccaggttagacttgaactcttgggctcaagtgatcctcccacatcagcctcctgagtatctgggattataagcatgtgccatagcaccggctcaaaaacctacttttaataatgttcatcctctgcaagctgagactttctttatgacccaacatatgtgtggggttcccagtttacatgatatttacaaacacgttgactttactggatgcttatacgtcctcatttcattgtgcttaaagaggaaactgtagctcagagaggttaagtacgttttgaaatgccacaactagtaatggtaaacctgggtccctaaagtcacgagagagaattatgagagtatgataggaaacttcaaaggtaccgaaggcagaaactgctaacagcattggtctctgaggagtgcaaacgagcaaatgaggggggaggtaaaaggaggggaaggagatttttatttttaattttcaaaaaccatgtgctgaaagttttatgctttgcatgcatatctctaataatttagggtgaatttgggttgggcaaatacccaggagagtgaccaatggcaagacaagacaatgagagaggtaagcgtgagtcctatgggatgcatagagtgagtccttaattctctatcagtgagggaagttggaagcagggtgggaaggttgggagaaagagaaaccctgaagggaactaagttactgggagcaggtgctggtaggtgagtcatgctgtggaagcctgtttgcactgtttcaaggagtgactctttggttggatgaaaaagggacgccgtgggtgtaggtagagaaggtgctggaggggaaggcaggcccaggtagcaaagggccttgtgggacaagctgggagcctgggtttcatcctagcggtggtggggagtcgttcaataatttttttggttttttcttttcttttcttttcttttttttttttttgagacagagttttgctcttgttgcccaggctggagtgcaatggcgccatctcggcttatcacaacctctgcctccaaggctcaagcaattctcctgcgtcagtctcccaagtagccgggattacagacatgcaccaccacacccagctaattttttttaatttttattttttgtatttttagtagagatggagtttctccatgttgatcaggctggtcttgaactcccaacctcaggtgatccaccctccttcggcctcccaaagtgctgggattacaggtgtgagccaccgcgactggccatcactcaataattttaagcagtgaaactcatgaccagatttgcattcttctaaaaccaggccccactctgtgatcctggcgtgtcttcccagacacccgggactatcacagtcaccactgcagcagggcagcgttttccagcacactattatcaccttgctcatgtgtttatttactttgcaaaaatattggtttgttagtgtcagagacaattccccatggatctcttgcttttttgctggcctggcagtgaggcattgactgtccttttgttccacactcttttcaaggatgtttgtgtagtgtactgccttggaagacagaggtaaggtttccctttagagcaaagaatacttgtttactgtcctgtataaaaataatactctcttcctccaggtcatttaggctctgataaaaccctaataatttagattctggtaaaatgctttctcttaatggcagagcttgttaagaagaacagaatactctggtgtgtttcacagcggttactttcccccttcccacttcatgccagaccatgaaggagatttttctcccatattcactgtgagaacctgatagggttcctggaggtaaaactcttagaaaaatgcagaggctccccttagactgggccccctggagtttttaattctcagactgctccgccgtgagcctccaggaattcattcattagacttcatgttttcctgtcctggtactggttcccacaggggtttctggtcatgggtttctgttgcagtagttttgattctctgtatccacctgcctgtctctcgaaatcttaagggcagtggtttgctctgtgatcccactcctctaatggatgtaagaattgttaattttctctttgttcagtattcactttctgttaagatgcagtgatgagttccaagcctcttacatgcttgactggaagctgggagtcccagagaacatttctttagagatgaggtatcactatgttgcccaggttagacttgaactctcaggctcaagtgatcctcccacatcagcctcctgagtatctgggattataggcatctgccatagcacccagctcaaaaacctacttttaataataatcatcctttggaagctgagactttctttatgacccatcatatgatcaatttagcataaatgtttaacatagacttgaaaaaaatgtatgttctaccactgatgagagagagatatttatatatttgcatatataaaattaggccaggtgtgttggctcacacctgtaatcccagcactttgggagtccgaggtgggcagatcacctgaggtcaggtgttcaagaccagcctggccaatatggtgaaacccagtctttactaaaaatacaaaaattagctgggtgtggtggtgggcacctgtaatcccagatgctcgggaggctgaggcagaagaatcacttgaacctggaaggcagaggctgcagtgagctgagacggtgccactgcactccggcctgggatattgagcgagacttcaacttaaaaaaaaaaaaaatttcttgcatttctatacactaacaatgaacaagccaaaaaggaaattaagaaaactacctcatttataataccatcaaaaagaataaagtgcttcaggccaggcatggtggctcacgcctgtaatcccagcactttggcaggctgaggcaggtggatcacttgaggtcaggagttcaagaccagcctggtcaacatggtgaaaccccgtctctactaaaaatatgaaaattagccgggcatggtgacgctcgcctgtaatcctagctactccagaggctgaggcaagagaattgcttgaacccaggagggggaggttacagtgtgccaagatcatgccactgcactccagcctgggccacagagcaagactctgtctcaaaaaataaaaataaaaaaagaataaaataattcagaataaacttaaccaagagagcaaatgacttgtatagtgcaaactacaaaacattgttgaaaaaaagtaatgaagacacaaataaatggaaagacagtctgtgttcatgggttggaagatttaatattgtaacaatgtccatactacccaaagtgatctacagcttcaaagcaatctctatcaaaatctcaatgacaattttgcagaagcagaaaaaatcctaaaattcgcatggactcttaagggaccctgaatagacaaaataattttgaaaaataaagaacaggccaggcgcggtggctcacgcctgtaatcccaacactttgggaggccaaggcaggcggatcacaaggtcaggagatcgagaccatcctggctaacacagcgaaaccctgtctttactaaaaaaaatacaaaaaattagctgggcatggtggtggccacatgtagtcccagctacttgggaggctgaggcaggagaatggtgtgaacctggaaggcggagcttgcagtgagccgagatcgcgccactgcactccaacctgggcaacagagcgagactccatctcaaaaaaaaaaaaaaaaaaatgaagttggacccttatctctaaccatacacaagaattagttcaaaaaactaatgagatccaaggcctaaatgcaaaagttaaaactataaagctcttagaagaatacatagggagaaagcttcctgacattggacttggcagatttcttggatgtgacaccaaaagtccaggcaaaatagtaaacaccaataaattgaactccatcaaagtcagaaagaagaacaaacttcagggccatgtgttgtgggcatttaccatgccctacaggaatagccacaaacttgatgattcacttttaggcaacagatctggttccttggttaaccagtccggtttctttagcttccttccttcctggaggttttcctattccgttgttaagtggggccaatgccaaaaagaaattagggcaatccctgctagagtatctatcaccttaatagatttcctactcctaccaattactcaggacgcagattctttgagaaagtttctcctccttccgagacaaaattttacacattaatatgtcttatgctacttgctgttgcacatatcactaattgaaatgatacattaatttgcataatttgctcatttctgtgccttcttctctaggccgtgagctccagggtgaaagactgaaggctcttcctccaagatcaggaacaagacaaagagacctgcttctaccactgctatttaacattgtactggaggtgctagccagaacctttagaaaaaaaaaaagaaaagaaaagaattaaaagcatccagagagaaaaggaggaggaagaagaggaggaggaggtgaaactgatgataaaaacccatccaagaatgtaaatgtgacatctgcagcaggttcaaatctaagctataagacaaacggaatccttcgtaaggactgtcatctattatgcacagagagccgaaatccattactgaaattctcttggtgagccacctgatgggcccagtgacgtactagtacacacaggagttgaaacaaaaaaaagtctggcatattctttggatgactggcagagtgtgacaccaatatggtacccagccctactatcattacaaggacttcatgaccaaaaaaataatagagaattgttttggtggttaaaacaattaaaagcatccaaattggaaaggaagaggtaaaagcatctctattcacagaaacataatcttatttatagaaaacactaaaccttccacacacacacaccccaaataaaacacctgttagaattaacaaacaaggccgggcgcagtggctcacgcctgtaatcccagcactttgagaggtcgaggtgagtgaatcacctgaggtcaggagttcaagaccagtctggccaacatggcaaaaccccgtctctactatatacaaaaaattagcggggtgtggtggtacgcacctgtaatcaaagctactcaggagatgaaggcaggaggatcgcttgaacctgggagacagaggttgcagtgagccgagattgcaccactgcactccagcctgggcgacagagtgagggtctgtctcagaaaaaaaaagaattaacaaaaaattcagcaaagttgcaaagtgtgaaattgacactcaaaactctattgcatttctacacactaacaaaccatgggcaacacagtgacctcaccctgtgtcacagggccaggtacacagaggtactgagtaaacattttagttttcattaagtggataaataaaaccaaaacctattatttaccactctcctttaacacctctctaaaagcagaaagagatacctccatgagggactttgtgacactttgggcaaaactaatgctggcactagtttggatgcatcagcgaatgctggacttctcacgttgaggattctccaggtgccctccttgggctcatttcttccatggagataaaagagaacagggttttttggggttttggttttgggtgttttttttttccagagacaaggtctcaactatgttccccaggctggatgaacttgggctcaagcaatcatctggcctctgcctccagagtagctgggactacaggcatgcaccaccaccatagccagctgttttttttttttttttttttttttttacataaatcctttctataataaacattgtccctgtgacagctagcgctcctcagtgttgtcaactaagggctcacatacgagccccatccagcctgtcatctcacatactgcatgaatccatttatacaaaatatccagaagagacaaattcgtagagatagaagactagtggttgctggaggctgagagaaggagaaaaagaggcgtgactccttcatggatacacggttcctttagggtgatgcgattgtttggaaatagtggtaatggttgcacaacattgtgaaagcactcactgcctctgacttgtacatttttagaaacttaatttgacattatgtgaattttacctcaaaaaaaaatgccattctggacataaggcagtaccagctttgccctaactcgtcttcacacagcactgcccaccttaccgccctctgcgttcttcacagtgttctaacccaactcccttcagagctctactgagatatcaccttcttagggcagcctcacataccattctctctaaaatagcatcagccatcaccctatgccttcataatatgtttcttcgtcatagaactattgccactggaactatccctatttctttcatttttggtggtttcttttttgagctagaagctcactccatcaccaaggctggagtgcaatggtacaatcatggcttgctgcagcctccatgcttgggcttaggtgatcctcctgcctcagcctcctgagtacctaggcaggtgccaccacacctagctaactttttaattttttgtagagatggggtctcactctgtttcccaggctggtgtcaaactcctggcctcaaacaatcctcccatcttggcctccccaaatcctgagattgcaggtatgggccaccatgcctggccttttatctttttaatttttgaaatgaccaatagaatttgagatgatggaattaacatcttggttcagtgctgggtcctcagatcccaaatagcagcaggcacaccgtactttctcagcaaatggctactaacttaattaaccaaactaattaaaggaggaaagtcatatgattttatacatatataattatgaataaagaatttgatgaaataccttcagcagaaatttctaatatgaaagtatgactaagtaaaataggatttttaaaacctttatacatttgaagatgtttattataaaccaccagaaatcatcatattattctccttaatatccacataagacagatatgtcttcttcaatctctattattcagtattactttggtgttgctaactatcgcaatacagtaacatgtagaaatgagttagagccgggtgtggtggctcacgcctgtaatcccagcactttggaaggctgaggtgggcagattacctgaggtcaggagttcaagaccagcctggccaacatggcaaaaccccatctctactaaaaatgcaaaaattagctaggcatggtggtggatccctgtaatcccagctactcgggaggctgagaaaggcgagtctcttgaacctgaaaggcagaagttgcagtgagccgagattgtaccattgcactccagcctgggtgacaagagcaaaactccacctcaaaaaaaaaaaaaggaaaagaaaagaaatgagcactggaagaaaagatattattatttttagacaatatgtttgtatatccagaaaacccaaaagatttgccttaaaagaagataaatggattaggaatatttaatattttgactgaatataaattaaatgtacatacatcaacagataatgttatactagcaataaccaggggaattgaaatgtaaaaaagtagagtattgcaaaaggttatgttacacaggaattaattgtatcaagaaatatgtaagatttgtggtaaggaaaccataaagtgatacttaagaacataaaactagatctaattttaaaaagtaaataaacctgggccaggcagggtggcacccaggctggagtgtaatggtgggatcttggctcactgaaacctccaactccaggctgaagcgattcttgggcctcagtctccccagagctgggattacaggctcacatcatgccctgctaatttttgtagtttttgtagagatagggtttcactatgttgcccaggctggtttcaaactcctgagctcagctgatctgcctgcctcagcctcccaaagttctggtattacgggcgtgagccactgcacctggccacttttttttttttttttttttttgagacggagtgtccctctgtcgcccaggctggaatgcagtggcgcgatctcgcacactacaagctccacctcccaggttcacaccgttctcctgcctcagcctcccgagtagctgggactacaggcacccgcaccacgcctggctaattttttgtattttttagtagagacggggtttcaccgtgttagccaggatggtcacgatctcctgacctcgtgatccgcccgcctcggcctcccaaagtgctgggatcacaggcgtgagtcaccgtgcccggccacctggccacttcttcattcttgttggctttgagtcaccagaaaaaaagtaaattctgcatccttatgtggcctattgaatctaaaattacttgttgactagtttcatcccttttcttctaatgtataatgtcacctttctcatatatcagtttgccattattagctttatctgttgatggactcctgccaggcaggagtgagcagctctgccgcacgggctggagaccccgccctcggtgctcagctgccactgcctcgtgacaacgatgctgaaagagcgaggttctgagagggaaatcaaaacagatggaggaagagaaacaagtggagggaaaaggagaggtggattgaatagaggcaaaaaaaaaaaaaaaagtaaataaacctctgggacgggaagtattaaacattttggtcattgttcccaaagccaaacaatatttacaaaaaattttcatctcaatctgcacttctaaattttgctatttttcaggaggaagctttagaaaattactttggagatgttaaagctaactgcacaaatattgtcaagtaaaacttgatagagtgtaatagggagagaagatttttttgtctcttattattattattattttgagacggagtctcgctctgtcgcccaggctggagtgcattggcgagatctcggctcactgcaagctccgcctcctgggttcaggccattctcctgcctcagcctcccgagtagctgggactacaggcggctgcaatcaagcccggctaattttttgtatttttagtagagacggggtttcaccgtgttagccaggacggtctcgatctcctgacctcgtgatccgcccgcctcagccttccaaagtgctgggattacaggcgtgagctaccgcgcccggccttttttgtctattattaaaatttgaaacaacgccattataaatgaagatgacactacctagaggtgggagggcagagacagacagacacggagaatggggactccacccagtgcagaacaagtatgcagcgccccgctcccctgcacccacaatgccatggagaggaccggatctcacctacgagaaagcctgtcacccgaggtcagggctgaggagcacttctggcctttcgtcttcaccatgagggacgcctgggagctgagggaccggggcagcactgctcgaagcgacactgaaggtgcagtttccacacttctgggtcctgcccaagggcacgacagcactgtcatagcaacagtgccgcaaggggtcgtagagcttgtccccacttcccaaatgccgctggcagagcatgaggtaagcacttatggggccactggaggagacagagctggtgaggtcagatggttggtagatgggtcccagccgggggtcccctgggggccacactcatcccccagtttcccagtccctcctgggctcacctggggctccgtgtgagcagaggagcctgaggatgcagagagaggccaagactgctgtgggagagggaaggggaagagggggtgatcgggaaaccacaggcgatccttggaagcccagcttggggaaggggggctccgagggagtttctgccctgactgagactcagggaagggctagaagctgaccttgccctgccttcctgcagacacacgctgggccctggggtgagagaggtcccagacaggggatgtgtcgtggtggatttgatgccaggtcctttgagagccaggagaggaccgatgctccctccaccctcaatctctctgtggtcaaggggtgcaggcaggactctcggaagaaatgggcctagggttcagggcaatgtggttgtttcctggttttggaggagctcagagctggggctcagctggggtcagggagggaaggggctgcgctgagactggtgttgtgctatgggtgtgactggcaccaacatttagaaaaagatggggctgggattggaactagcgctaggcaagactttggggagtagtttggggactgaaatggctgtggatggggctggcccgggggctatggatggggaattgctgtgatggagccatgtctgaggaggaggccgggcatggggacagggatgaggtgtagtttggggtggggagtgagcctcggtggtggctgagatgggagatgggctcgggtgggaatggggtcctgtcctccttacccaggacatggcctcgggagccatggctccggggtggctggaggggagtgagtgggtgatcagcaggtctcagcagctccttggctcctatactcctagaggagctggtgataccgtgggatgccctgccttcctgcagagacatgctgggccctggatcgagacaggtcccagacagggtatgtgtcatggtggatttgatgccagatcctttgagagccaggagaggaccgatgctccctccaccctcggtccctctctcctccagaatggaggcttctttggcaaataggaaattgcaggacactcctggggttgtcctcaccctcccacactcacacagccacagtcttacagctgaccctgtgagtctagagctgagacatgcaccgaaggttgctgtatgacctggtccccttctagacgtgaatcagtgcgagggcccaggacagcagaagaggtgtgaggccatcctgtgacaagggagccacagggtgtccagacccagcgggagccgaggattcaggaaaatctccccagtcagctccagaggtgcccacagtgtgagctctagtgtctcccaggtagaggccaaagcgtcacctgcccggccctgggggtggaagtggagtagacggcactcctatctgggcaaccgagtaagaccctgtctctgaagaagtacatacatttacttagactcctctgtctttgtcatatatatacatatatgacatatatgagatatacatattatatatatgatatatatatgatatacatatataaaatgtcatatatatgtgtcatatatatatgacattttatatataggagctcaagaccagcctgggcaacgtggcaaaactccacctctaccaaaacatacaaaaatgaactgggcacagtcgcacacacctgtagtcccaactactcaggaggctgaggtaagaggatgacttgaacccgggaggcagagtcgagctgagatcgcgccactacctgccagcttgggtgacagagccagactgtgtctaaaaacaaacaaacaccagaaggcagtgatttttgccccaaagtgatttaactctccctagtcattatacagaacaagaaaaataagaacatgaattagtctgggcgcagtggctcacacctgtaatcccaacactttgggaggccgaggcgggtggatcacttgaggtcaggagttcaagaccagcctggccaacatggtgaaaccccgtctccactaaaaatacaaaaattagccaggtgtgatcccagctactcgagatctgggtagctactgaggcaggagaattgcttgaatccgggatgtggaggttactgtgagctgagaacacaccactgcactccagcctgggtgacagaacgagactccatctcaaaagcaaacaacaacaacaaaagaaaaagaagaagaaagtgagttgacctgtaatgtgagaaacggaagttgtaatcatatgtgactcagatcacagtcatatcacttaaagtgctgttatggttcaagtggcttttaaataatattgattttcacagtggtcagaccacatccctaccctggttaaccccacttcatgaagcagagcgtttggagggggaggatgggaggaggagagcaggaacccaaaaccctcacgtggctgctctgctcaacaaactggaaacaccgtcaacttattttgatacaaatccctatgacccatttttattcaagaattctgtcacctttggctgtttttctgaggtttctccatagcaccttatcctaaaattttctcttttttttaattttaattttaaatttttttttttttgagacagagtgtcactgtcgtccaggctggagtgcagtggcgtgatctcagctcactgtaaccccttcctcccaggatcctcgtgccttggcctcccgagtacctgggtttacaagtgtgcaccaccacacccagctaatttttgtatttttagtagaggcggggtttcaccatgttggccaggctggtcttgagctcctgacctcaagtgatccaaaccccctcagcctctcaaagtgattacaggtgtgagccaccatgcccggccctgctcctggaattttcttacagaatcagagcagacaccattcctagaggtaggaaactatctctgcaattggctgttctggaagccagaaacaaaggaccggccaggaacccatctcccctgacaattgtggaggagcaagttgaggactttcaggatccacaatgccaggcaggagggagcagctctgccacacagggctggagaccccatcctcgatgctcagctgtcactgcctcgtgctattaagttgccacatccttgatggtttaatgcccaactccagggctgcttgctctgcctgcattggttgattcttctggaaaaataaaactctataatattttgatccagggagcccaaggaccatcttcccagctctctcgaattacgacacaatcctcgtcctaactccactagattgccctggttaatggggtaattctgtgagaaaacacaggcgcatcaatattgcagtgtcccttacagaagcgctgagagtaacactattgctttagttggggtcctcatagaacaggtgatacctcatagaattttctagtgctttccaatacctcaattgatatcattcagattcggccgggcgcagtggctcacgtctgtaatcctagcactttgggaggccaaggtgggtggatcacctgaggtcaggagttcgagaccagcccagccaatgcagtgaaaccccatctctactaaaaacacgaaatttagccaggcgtggtggtgtacacctgtaatcccagctacttgggaggctgaggcaggagaattgcttgaacccaggaggtggagtttgcagtgagccgtgatggcaccactgcactccagcctgggcgacagagacagagtgagactccatctcaacatatatgtatacacacacacatatatatctcagatcctctagtgcaaagtcacatatctgtatgggagctccaataaattggaatgcagaggttaaaggttaatcagttagctacacctactaggaactttctctgttataaggggtggtgcccaccagggactggtcccatggccagttcccacatataatctaaccctgtatgggattttagaaggtgggaaacaaagcctggcacggtgactcacgcctgtaatcccagcactttgggaggcccattcgggcagttcacttgaggtcaagagtttgaggccagcctggccaacatggtgaaacctggtctctactaaaaaaaaatacaaaaattagctggacatggtggccggtgcctgtaatcccagctactcaggagcctgaggcaggagaatctcttgaaccggagggacagaggttgcagtgagctgagattgcatcactgcactccagcctggaggccaaggcaggaggatcacttgaggccaggagtttgaaaccggcctagccaacatagcaagtccccatctcaaaacaaaaagcaaaacacaatattttgacccaggcagtgtgaagggggcaggtggcatctttttgaagatgccagaaaatttgggacctccaaacttggacaatgttagcagctgtctgaggccacaaaattaggcaaaccacactggagaaagaaaatccttcggaaacctgttcatttaggcaactgtatgagtttcagctgaattttctaaatgcctctaaattacatcctcagcctggagggacatcagagctgatttgactcacttgtggggcctgcttctgagttattaacgtggttatggctcccccatgtggtggaggggggcatattcattttttaagttcctatttcagcccagcagggtggctcacacctgtaatcccagacctttggaagacccagcgatcgctcgagcccaggagtttgagaccagcctgggcaacatggtgaaagcccgtctctatttaaaacaaaacaaaacaatgaagttcttcctatttctctccctgtccttgacacgaggggattccaactactttttctgctaatcgtccttgtacatgagcatatatactgacaggatttttacctgtcccaaataatatgcctttggtcccatccccagacaggcagggaatgaacaggccatctgtgactctcggtcttgctctgtcgcccaggctggagtgcagtggtgtgatctcagctcactgcagcctcaatcttctgggctcaaatgatcctcttgcctcacccccccaagtagctagaactataggcccgcacccccgcgcctgcctaatttttttcttttcttttctttttcatagagatgggggtctcactatgttgtgcaagctagtctccaactccaggctcaagcaatcctcccacctcagcctctcaaaatgctgggattataggcatgagccattgcgcccaacctggatgttgagttttttttttttaagaaactgccaaactgtttttcagagcaatgtataaatgatccaatttatctccacccttgccagctttcaatggcgttgcggttttcaaaatttttagccattttaatttaatttgcgtttccctaatggctaatgatgttgaacatctttttatctgcttacatgtcatctgtatctcttcctcattgagatgtctcttcatgtctttaaaaagtttttattttcatttgattttttcatagagacaaggtctcactatgttgcccaggctggtctcgaactcctgggctcaagcaatcctcccaccttggttccacaaactgctgagatgacaggtatgagccaccatgccagatcctcttcaggtcttttgcccatttttttaatggatttttttttcactattgagttttcacagttctttacattttctagataattgtcctttgtcaggtatgtgctttgcaaatattttctcccagactatagccctatctgtccttctaactgggtttgttttttgttttttgttttttggggggtttttttgagacggagtctagctctgttgcccaggctggactgcagtggcgtgatctcgacccactgcaacctccacctccagggttcaagcaattctcctgcctcagcctcccaagtagctggaactacaggcgtgcaccaccacacccagctaatttttgtatttttagtagagaaggggtttcaccacgttggcgaggatggtcttgatctcctgaccttgtgatctgcccacctcagcctcccaaagtgctgggattacagatgtgagccactgcgcctggcctaactgggtttttcttagagcaaaagtttttccttttcataacatccaaactatcaatttttctttttatggactgtgcttcagatgtcaaatctaagaactgtttgcctggccctagatcctaaagatgttcttgtatgttcgtttctaaaatttttgtagttttatgtcttacatttaaatctgtgatccattttgagttagtttttatataaggtgtgagagaggagagaggttgatttgttttgttttgttttgttattcctatggatgtccaattgctcggcaccatttgttaataagctctcttccctccattgatttccctttgcgcttttgtcaaaaatcagccgggcccaggcagagtggctcacgcctgtaatcccaacactttgggaggctgagatgggaggatcacctgaggccaggagttcgaggctgcagtaagtcatgatcactccactgccctccggcctgggcaatcctgtctcaaaaagaaaaaaagttgcacatatttgtgtgggtctatttctgagttctctattctgttcctattctattattttctctattcctctgccagtaataccacacagtcttgattactgcagctagatgtctttaaattgggtagactgactcttgtcactttattctgggttatttatttatttatttatttatttgagacagggtctcgctctgtcacccaggctggagtgcagtggtgtgatctcggctcacagcaacctccgcctcccaagttcaagcaatcctcccgtgtcagcctcccaagtagctgggattacaagcgtgcatgaccacactcagctaatttttgtagttttagtagagatggggattctccatgttggtcaggctggtctcaaactcctgacctcaagtgatccaccagcctccgcctcccaaagtgctgggattacaggcatgagccatggcacccagccaattcttcttctttcaaattgttttacactttctagttgctttgccattccataaaaaaatttaggataatctagtcgatatctaaaaaaggaattgtgttcaacctgtgtatttatttagggggaaattgacatgtttactatgctaagctttctagtccatgtacatactataccttttcattcttttagagagtatttgatttattttatcagaggcttttacttttcaggatacaagtctggtactttttttttgtttcattttgattttttctttcctttccttctttctttctttctttctttctttctttctttctttctttctttctttctttctctctctctctctctcttccttccttccttcctttctttttcttcatttttttttgacagggtctcactctgtaacccagactggagggcagtggtgccatcatggctcattacagccttcacctcccaaactcaaggaattctcccacctgagcctcctgagtagctgggaccacaggtgcatgccaccacacctggctaaattttttttttatagagatagggtctcactatgttgcccacgcttggtacatataatattggatttacacctaaatatttcattgttaagcagttgtatttggtattgattttatctttaatttagctgtttatcactgatctataccaatgcaattgattttgtatgtttatcttgtctatctcaaccatggtgagcttgcttgttagctgtaggaggttttgtggtttttctgtcttgaggttttggttttattttttgttttttggtagattccttgggattctctatgtagacaatcatgtcattgcaaataaggacaattttatttcttcctttccaatccctgtgatttttagtcatatggtaactctatgcttaattgtttgagaaaccaccagactgttttccaaagtggtagctgaaacgtttcgcattccgcaggcaatgtatgaaggctctaatttttttttttttaattgagatggagtctcgctttgtcacccaggctggagtacagtggcacaatcttggctcactgcaacctccacatcccgggttcaagcaattctcctgcctcagcctcccaagtagctgggactacaggtgcgtgccaccacacccagctaattttttttttgtatttttagtagagacagggtttcactgtttagccagggtggtctcgatctcctgacctcatgatccgcctgcctcggccttccaaagtgctgggattacaggcgtgagccgccacgcccggccagaaggctctaatttatctacatcctcatcacacttgttatcattctcactttttaattctagccagccttgtgggtgtgaagaggcatctcattgtggttttgatttgcatttccttggagactaatgatgtcaagtatattttcattgcatattggctatttgtatatctttcttgaagaaatgtcaattcagatcctttgaccatttttagttgatttatcagtcttattattgaagtgcaggagtttttttctatattctaggtacaagtcctttaggagatacatgatttgcaaataggttttcccattctgtgtgttattttcacttttttgactgtatcccttgaagcacaagtgttaattctgacgaaatgcaaattatctatttttttcttttgttgttcatgtttttggtatcgtatctaagaatactgtattttatttttttgttttgttttgagactaagtctcactctgtcaacccagactggagtgcagtggcacaatcatggctcactgcaacttccatctcccaggttccagagatcctcctgcctcagcctcctgaatagctgggagtacaccaccacacccagctaatttttatatttttagtagagacagggtttcgccatgttgcccaggctggtctcgaactcctgacctcaagtgatctgcccacctcggcctcccaaagtgctgggattacaggcataagccgacgcgcccggccttcttgtttttataagtattagtcttcagctttccatcttctgtcaggatttattaaaagactcttagatatgagacaggaggatcacttgagctcaggagttggggaccagcctgggcaacagagggagacccaatctctattttaaaaaaaaatttttttttaataaattagccaggaatgatggcatgcacatgtggtcccagctacttgggaggctgaggtgcgaggatcgcttgggcctgggagttccaagtttcagtgagccatgatcacgccactgctcagcagtctgggtggcagaaagagatcctgtctccaaaaacaacaacaacaagataaaacaacaagaaaacatttaccagttttgtacccaagcgagttagagaaacgctacacttggagacaaattcaggaatcctttattagctggcgaccgagagacggctaacgctcgaaattctctcggccccgaagaaggggcttgattttcttttatacgttggtttagagaggggagggggggaatctagctgtaacaatctttcagaagtaaaacagataaaaaattaaaaagacaaatggttacaggagaacaaagtattccaggtgcaggggctttaaattcatcataaggtgataggcgtgagggctctgccggacacaaacacgggggctttatggcactatctcctgagcgaattcctgggaactacggacattgattgccacagtaccttatcagttaattggactctctgatatgctgagagtcagcttacacgagttaactccttgaggaagggggtcggtaaggagtcctggatgtcttgcaaatgaaggagccaaatggagtccgtccggttttctcagctaagggagagtctattcatattaaaacaaggttaggtattacaccaggacaacagcaataacatgaaagcattcttttattgaataaatactattcaagttctgtatttccatggattagttaattaaatcacaaaatcaccttaagatgtcagtctcgtaagaaaactatggctcagggagagagacagaaagagattttctaagtgctgtatggcagtgtgaggagtttatctctgcagggctttggcaacaaatggaaactggttctgttcggagatgggcaaccacggatgtacgctgctcagatcttcctgtaagaaaggaagcccactggccgggcgcagtggctcacgcctgcctgttatcccagcactttgggaggccaaggtggtcagaccacaaggtcaggagatcgaaaccatcctggccaacatggtgaaaccccctctctactaaaaatacaaaaaatcagccgggtgtggtgtcacgcgcctgtagtcccagctactcgggaggctgaggcaacagaatcgcttgaacccaggaggcagaggttgcagtgagctgagatcgcaccattgcactccagcctgggggacagagcaggactccatctcaaaaaaaaaaaaaaaaaagaaagaaagaaagaaaggaagcccactgtatgagtctgttctcacacgctataaagatactacctgaggctgggtaatttataaacgaaagaggttttaattgactgacagttctgcatggctgggaggcctcaggaaacttacaatcgtgacgaaagatgaagtgggaagcaaggcacatcttacttacgtggtggcaggagagagtgaggaggggaaactcccagacactgatgaaacaaccagatctcatcagaactcactcactgtcatgagaacagcatgggggaaactgcccccttgatccagtcccctcccaccaggtccctccctcctcacctggagattacaattcaagatgagatttgggtgaggggacagagccaaaccatgtcacccacgggtcagccacagagcatagttagctttactttagctgtaatgccttcaggatctgtcatagcctgggagaccagatcgtgcacttcctggccaatgacctggacatttcttccaaacgcaggactcctcaagtggaaaatctttgttgtgaagcaccctttgaggtttgccaagattttctttcagctctgaatcatagtctgagtatttttctgcccacctcagcttctctctgtcaagcaaaactgacatatctggaaagtaagaaaataaaccaggccacatgcagtggcccatgcctgtaatctcagcactttggaaggccaaggccagaggatcatttgagtcccagggtttgagacgaccctgggcaacacaggaagaccctatctctacaaaaaatgttaaaagttaaccaggcgtggtcaagtgtgcctgtggtcccagctgcttgggaggctgaggtgggaggatcgcttgagcctgggagttgaggaccagcccagcctgggaaacagcgagaccctgtctccacaacaaacaaaataagttgggtgtagtggcacacacctgtagtctcagctacttgggaggctgaggttggagaatcgcttgagcctgggagatcaaggctgcatagagccaagattgcaccactgagctccaacctgggtgacagagcaagaccctgtctcaaaaaaaaagaagaggaagaggaagaagagagaaagaaagaaagaaggaaagaaagaaagagagaaagagagaaggagaggggaggggaggggagggagaagaagaaagttccctcatctatcaagaaactggacctgccaaagagtaacacagttgccttccctgaaatttccttaaccctagaagattaaaattcacatcacaaggccgggtgcggtggctcatgctggtaatcccacactttggaaggccgaggtgggtggatcgcctgaggtcaggagttcaagactagcctggccaacatggtgaaaccccgtgtctactaaaaatacaaaaattagccaggcgtggtggcatgcgcctgtagtcccagctactcgggaggctgaggcaggagaatcacttgaacccaggaggcggaggctgcagtgagctgagatcgcactggagattggactccagctttggcaacaagaacaaaactctgtctcaaaaaaaaaaaaaagagaaagaaaaacttacatcacagagaaaaaggctgaaaataaaacaccacaactgaaagccaggcaaactgcatcccaaaccactgtctgctctccatcttattcaactggcaaagaaaattatttactaactttcactcgcatccgtgtgaagacaccaccaaacaggctttgtgtgagcaacaaggctgtttatttcacctgggtgcaggcgggctgagtctgaaaagagagtcagcgaatgcagataggagtggggctgttttataagatttgggtatgtaaaggaaaattacagtcaaagggggaggttgttctctggctggcaggagttgggggtcacaaggtgctcaataggggagcttttgagccaggatgagccaggagaaggagtttcacaagataatgtcatcagttaaggcaggaacaggccattttcatttcttttgtggtggaatgtcatcagttaaggcaggaaccggccatctggatgtgtacgtgcaggtcacaggggatatgatggcttagcttgggctcagaggcatgacatttctgtcttcttatattaataagaaaaataaaacgaaatagggttgaagtgttggggcagtgaaaattttggggggtggtatggagagataatgggcgatgtttctcagggctgctttgagcaggattggggtggcatgggaacctagagtgggagagattaagctgaaggaagatttttgtggtaacagttgatattgtggggttgttagaagaaacatttgtcatatagaattattggtgatggcctgggtacggttttgtatgaattgaaaaaagaacggaataagacaaggagaaaaacaggtattaaaggactaagaattgggaggacctaggacatccaattagagagtgcctaaggaggttcagcatagccctgccagcaaagattatttgtttactttaagagggagttaagagtggcagtttggggatagcaccaggagatatccgctgcgatggtttggagaaacagtgtaaaccagcagtgtaaacaagagcagggcatttatgagtagttgagaacggtgagtaggagttgactagacagaagatagtaaggatgacaagttttttggggcgcagtccaagttggtctggtgtctggaatgagactggggcctaataaaaaggattgtccatacaggagttcaaatgggctgtaacctgcagcatttcgaagacaggcccgaattctgagaagggaaagtgataaaagtactgtccagtcctttttaagttggtgactgagtttggtgaggtgtgtttttaaaagaccatcagttcactgaatactaagagcctgagaaactccttgggtgatttgactaataaaggccggtctgttataggactgtatagaggtgggaaggccaaaccaaggaattatgtctgacagaagggaagaaatgaccgtggtggccttctcagaccctgtggtaaaggcatctacccatccagtgaaagtgtctacccagaccaagacgtattttagtttcctgactcggggcatgttgagtaaagctaatttgccagtcctgggtgggggcaaatcctcaagcttgatgtgtagggaagggagggggcctgaataatccctgaggagtagtagaacagcagatggaacactgagaagtgatttccttgaggatagatttccacgatggaaaggaaatgagaggttctaagaggcaggctagtggcttgtactatagcatagcctgcctttgccggtgtgtggcgattaggcctggtggaactgccatcaataaaccaagtgtgaccagggtgaggaacaggaaagaagaaatatggggaaatggggtgaatgtcaggtggatcagagagatgcagtcatgggggtcaggtgtggtatcaggaataatgtgggaggccggattgaagtccgggccaggaacaacggtaattgtgggagactcaacaaagagtgagtacagctgaaggagccggggagcagaaagtatatgtgtcaggtgtgaggaagaaaatagattttggaaattatgagaaccatagagagtgagatgagcagagtttgtgattttgagggtctctaaaagtattagggtggcagtggccgccacatgcagacatgagggctaggcaaaacagtaaggtcaagttgtttggataaaaagggtacaggacgcggtcccaattctcgtgtaagaattccgactgcacagccctgtacttcggctgtgtgtaatgaaaagggttgggatgagtcagggagagctagggtaggagcagtctctaaagctgtcttcaaggaacggaaagaggagtggggaaaggatttaggatctatggggtcagctaggtttccttttgtgagtttatataatggttttgttaggatggcaaaaccaggtatctaaagtcaaaagtatccaaccatgcctaggaaggaaaggagttgttttgtagaaggtgttggggtttgagagatcagtcggacacgattggcagggagagcatgggtgtttttatgagaattatgccaagataggtaacagatgaggaagaaatttgggcttaactgaagtaatgggggctgtctgtgaagccttgcggcagtacagcccaggtaatttgctgagcctgatgggtgtcagggtcagtccaagtgaaagcgaagagaggctgggatgaagggtgcaaaggaagagtaaagaaagcatgtttgagatccagaataatgggttgtggagggaggtattgaggataggagagtatatgggtttggcaccatggggtggataggcaaaacaatttggttgataaagcacagatcctgaactaacctgtaagccttgtctggttttaggacaggtgaaatgggggaattgtaaggggagtttataggctttaaaaggccatgctgtagcaggagagtgataacaggctttaatcctttcaaagcgtgctgtgggatgggatattggcattaagtggggtaagggtgattaggttttaatgggatggtaaggggtgcatgatgggtcgctaaggagggaggagaggtgtcctatacttgtgggttaaggtggggggatacaaggggaggatgtgaaggaggctttgaactggggaaaagggcagcaatgaggtgtggctgtagcccaggaatagtcagggaagcagataatttagttaaagtgtctcggcctaataagggaactgggcaggtggagataactaaaaggagtgctttaaagagtatcgtctaagttggcaccagagttggggagttttaagaggtttagaagcctggctgtcaatacccacaacagttatggaagcaagggaaacaggcccttggaaagaaggtaatgtggagtgggtggcctctgtattgattaagaaggggacggacttacggtgcactgtgagagttacctagagcatctgtgacggtccaggaggcttctgagatgatcgggcagtgtcagtcttcagctgctaagccgagaagatctgggaaggagtcagtcagagatccttgggccagagttctaggggctctggaagtggctgccaggtgagttgaacagtccgattttcagtggggtcccacacagatggaacagagcttgggaggaatcccaggctgtgggcattcctttgcccagtggccaaatttccagcacttgtagcaagttcctgggggaggaggttctggaggaacccctggctgctgcggttcaggcatttggagttcttgcgtgctggagatgtggctggggtttctctcacagtggaggtaaggaattgcaactcagaaatatattgttacttagctgcctatactttattattgtacacattgaaggcgaggctaattaagtcctgttgcggggtttgagggccggaatttaatttttggagttttatttaatgtcaggagcagactgggtaataaaatgtatattgagaataagacggcctcttgaccttctagggtctagggctgtaaagcatctcagggttgctgtcaaacgagccatgaactgggctgggtttttatatttcatgaaaaagagcctaaacgctatccaatttgggataaagaaaaaggaacattaacctggactatgcctttagctccagccacctttttaagaggaaattgctgggcaggtgggggagggctagtcacagaacaaaactgtaagccggaccaggtgtgaggaggggaggtgataaaaggattgtagggtaggggagcagaggctgaggaagaattgggacctagctcagcctggtgaggagcagccttggggagaaggggagaggtcagatgggtctgtagaaaaggaagattggaaagaggaaagactcagcaatgcttggggttgggactgagggacaggcagcagggaaagaaggaagatttaggacgagttgcattgggaacagagactagggagggaccgatgtgtaaaagaatgcctggacatcaggcacctcagaccgtttgcccattttacggcaagaattatttagatcttgtaggatggaaaaatcgaaagtgctgttttctggccatttagagccattgtcaagttggtattggggccaagtggtgttgcagaagaaaacaaggggtttaggttttaggtcaggtgtgagttgaagaggttttaagtttttgagaacacaggctcagggagaagagggaggaatggagggtggaaggtagcccatagtgaaggaggcaagcccagagaaaagagagagtagagacacagaaggggtggggggtgattaccccccaggaaagtggagaaggggtagagacatggagagaaggggttggggggttcttgccccccaaaaaagtggtacttgctgctaagggtgaaggaccaaggcaggcatccccacatggtcagacacctctgaaatgtgggtgaataatcaggcaggcgtccccacacaattaaacaccaagggaagactgtcttcccgagtctgtgactggtgccggagttttgggttcacggataaaacgcgtctcctttgtctctaccagaaaaggaaaggaactgaaattaagagaagggagagattgaagtgtgaagccaagattgaaaggagaaagaggttgagggatagtgagaggggttggagaagagagtaaaaagagaccgcttacctgatttaaaattgatgagatgttccttgggctggtcagtctgaggacctgaggtcataggtggatctttctcgcgggacaaagagcaggaggacaggggattgatctcccaagggaggtcccccgatcggagtcatggcaccaaaatatttcactcgcgtccgtgtgaagagaccaccaaacaggctttgtgtgagcaacagggctgtttacttcacctgggtgcaggcgggctgagtcggaaaagagagtcagggaacggagataggggtggggccgttttacaagatttgggtatgtaaaggaaaattacagtcaaagggggaggttgttctctggctggcaggggtgggggtcacaaggtgctcagtaggggagcttttgagccaggatgagccaagagaaggaatttcccaagataatgtcatcagttaaggcagaaacaggccattttcacttcttttgtggtggaatgtcatcagttaaggcaggaacccgccatctggatgtgtacgtgcaggtcacaggggatatgatggcttagcttgggctcagaggcctgacactaaccattgtctgagcattagggccattcatttccccctaaaaatcactgaatatcacgcaaattgccatatttcccccatgtccccttcccctatgaaaaaggctaagaagtatctgtaccccattgggttattgggtaatcagtctcctgtgagtcccctgggcaatgcatgttaaaaatacatttatatgctgccttcttctactagtctgccttttgtcacttcattttcagtgaaccttcagagggtgactgaggatgtgttccctctttgcccctacacagccaaagtggttaacatctcccccgaaatcctttacaggcatacaaaaatcatattacaaaccctccattccatccccagttcataccccagccacctcctctatctgaccctcacacatcaatctgcctgaatcactcagggccaggtactggaccactgaagaccagccgcgcattcttgagtctctgacatcattcaaagcggccaatcctgagctgtttccccttccctgccttgcctttcccatggaaaccgcaataaaggccctggcctaggctttccctctctctcccacctgctgaccgaacctggtgctttcccctgcatggcatggcatgcgcccgtctctcaggaagtgtaggtaatcaattctttcaaaggcatcaacttcatgttgtcactcagtcacttccagaagattaaatctcataaaggccgggtgcagtggcttatgtctgtaatcccagcactttgggaggccgaggtgggtggatcactcctgaggtcaggagttcgagaccagcctggccaacatggcaaagccccgtcgctactaaaaatacaaaaattatccaggcgtggtggcacgcacctgtaatcccagccgctcgggatgctcaggcaggaaaatcgcttgaacccaggagacagaggttgcagtgagctgagatcatgccactgcactcagcctggagctagactccgtgtcaaaataaataaataaatacatctcatgagaagaactgagacaactcccacctttctctcagcatctgctccctgtaggagccaagctgatccaagagattgatccaataagtaatcatattgaggataacggaaacccgggttaaaaccataaaggccaggccaggtgcagtagctcacacctgtagcactttggtaggctgaggcaagagtatcacttgagcccaggagttcgagaccagcctgggcaacatagtgagaccctgtctctacaaaaagacaaagtaaaaattagccaggtgtggtggcatatgcctgtggtcccagctactcaggaggctgaggcaggaggattgtttgagcccaggagatcaaggctgcagtgagccgaaattgcatcactgccctccatcctgggagacagagtgagaccttgtctaaaagaactttaaattatgtgatgtgaaatgtttaaaacagtttctggcacataatctttcaatgaattggagatattagtatgtaaaatctagctactggtgctgggtgtggtggctcacacctgtaatctcagcactttgggaggccaaggtgggcggatcacttgaggtcaggagttcgagaccagcctgaccaacatggagaaaccccgtctccattaaaaatacaaaattagccgggcatggtggcgcatgtctgtaatcccagctattcgggaggttgaggcaggagaatcacttgaacccaggaggcggaggttgcggtgagccgagatggcatcattgcactccagcctgggcaacaaagaacgaacctctgtctcaaaaaaaaaaaaaaatttgctgggtgtggtggcacccgcctgtagtcccagctactttggagactgaggcaggagaatcacttgaaactgggaggcagaggctgccgtgagccaagatcgcgccactgcactccagcctgggcaacagagcgagactccgtctcaaaaaaaaaaaaggagaaagaaaaagaaatcaggctactaaaatatgtagccaatgtgaccctcatatgtaagtatagtatcagagtcatcctaatttctgccacgagagggcgtgtcaggcttagttagggcttagctgccagcagctcccaaatgatggtctcagaactccttaattttattattatgattactattattagtattattttgaggcaggtccacactctgttgctcaaactggagtgcagtggtgcaattgtggctcactgcagcctcaaactcctggactcaaacgatcctcccacctcagcctcccgagcagctggactatgctgtgtaggccaccacaccggctaattttttcatccttgatagagatgggggtctcactatgttgcccaggctggtcctgaacccttggcctcaagcagtctttccactttagtgtcccaaagtgctgggattacaggtgtgagccaccgcccccagtcatgtttggattttttaagtgacatatcggccgggcacagtggctcacacctgtaatcccaccactttgggacgctgaagtgggaagattgcttgagctcaggagttggagaccaggctgggtaacagagcaagaccctgtgtctacaaacaattttaaaaattagctggacgtcgtggcgtgcacctgtagtcccagctacggaggaggctgaggtaagaggatcacttgacccaggaggttgaggctgcaatgagccatgatcacactgcgccactgcactccagcctgggcgagagagtgagactccattaaaaaaaaaaaaaaaaaaagtaccacatgtctatggcacatataatgtaacgccccaactgggttcaggatagttcctggaatcaaacacatcaacatttatgcaatgaaatgagggctattcacagaaacgtggagtaaatatagaagattgccaaaatagccttgtgttagttcaggtcaagttttgccaccaaataagttatacaacaatctctaccttttcagagttatttggaagttggaattgtgtgtggatgggggggtgtttgttttgttttgttaagacggagtctcgctctgtcgcccagcctggagtgcagtggcgtgatcttggctcactgcaacctccacctcccaggctcaagcgattctcttgcctcagcctcctgagtagctgagactacaggcacgcaccaccgtacccggctaaatgtcatattattagtagagacagggtttcaccacgttggccaggctggtctcaaactcccaacttcagttgattcacccaccttagcctcccatagtgctgggattacaagcgtgagccatcacacctggccggaattgtggctgatgaagggtgagcctctcatttctcatagataagaggtgtcctgccaggtcaaagcttgaatgcaattctgctcacagacatacagagtcagatatcccttcttttgatgaattaaaagtttgtatttaaggtgaataagacaatattcagtcaaaagtctgtttttctttagagtcaacattttgaaataagaactaaataagagcgttcctatgtctatgtagactacggcagaagccaaggctgagtgatcagcatagatcatctgagattcaaataccatgagaggggtagacgtgggccatacaattctctgaagtggagaactttcccaatatcagcttctgcccgaaagagggtgctacgttcctttgatccatgtgtaacagttgctttcccagaaaagtcagagtgagttaaaatgctacaggccaggcgcagtggctcacgcctgtaatcccggcattttgggaggccgaggcaggcggatcacttggggtcaggagttcgagaccagcctggccaacatggtgaaaccccatctctacttaaaaaaaaaaaaaaattagccgggcatggtggcgggcgcctgtaatcccggctactgaggaggctgaggcacaacaatcactggaacccaggaggcagaggttgcagtgagcccatatcgcgccactgcactccagcctgggcaacagagcaagactccatctctaatctaaataaaatcaaataaagtaaaataaaataaaataaaatgctgcagccaggcacagtagctcacacctggtaatcccagcatttggaaggctgaggcaggagggttgcttaaacctagtagctttgtttattttctttccttaagacagcagaaaaggtgatttatttatttctatttatttatttgagaactacaggtgcagactacaggagcgcagcaccacgccaggctaattttttgtatttttagtagagatggggtttcactatgttggtcagtctggtctcaaactcctgaccttgtgatctgcccccctcggcctcccaaagtgctgagatgacaggtgtgggtcaccacgcccggcctattttatttatttatttattttgagacagagtctcactctgtcaccaggctggagtaaagtggcatgatctcagctcactgcaatctccacctcccaggttcaagcaattctctggcctcagcctctcgagtagctgggactacaggcatgcaccaccatgcctggctaatttttttttcttcttcttcttcttatgcttgtttcctatcagctgatttttgtattttttgtagagacagggttttgccgtgttgcgcagtctggtctccaactcctgggctcaagcgatccacctgtttcgccctctcaaagtgctgggatgacaggtatgagccatcaggcccagtcagagcctagaattttaagtccagccttggcaacatagtgagaacccatctttacaaaaaaacaatttaaaaattagcctggtgtgatggcatgcgtctgtggccccagctactctggaggctgaggcaggaggattgcttgagccccggaatttgaggctgcagtgagccatgatcacaccactgcactccagcctgagcaacagagtggaaaaaaaaaaggtgcaatgttcttgttgtttctatctaagatggcctgccatgattgttaacagattcttcctgtacaagaggacttgaacaggatacaggaaacccctccttgccagagctatgcgtgcatcgcacaatgcctggagtccctggcttcagccactaattaccggaagctccataagtttgcaaatacctcccagcttccaagagctactcactgagccctaaaaaaggtgcctgcaggagaggtgagggtgcagggcctgggaggggccccttggccacccagagtctgtagagagtttctcctcctgggagacgctgaggccaccagcaggggactagggccacagtctccgtcacaccgctgtccagggcagtcacctgcatcagcatcaagtagacatcagcatctgcacagggaaccgtgacatatacgagacctttgcgtacatgcatgtgatgaccataaacatgagttcagcattcaaggtttgtttgtttgtctgttttttgagacggagtcttgctctttgctcttgtcacccaggctggagtgcagtggcatgatctcagctcactgcagcctccgcctcccgggttcaagtgattctcctgcctcagcctcctaagtagcagggattacaggtgtacaccaccacccctggctaatttttgtatttttagtagagacagggtttcgccatgttggccaggctggtctcaaactcctgaccttgtgatccacctgctgcggcctcccaaagtgctgggattacaggcatgagcccacacccagcccagcactcacattttattaaaggcagctgctcttctttaaagaaccccagtgtgtacaggtgtcagtatcagtcactatcggcaccaacatgcgtccacgtgccgtcatcggtaaccatgctactatcaaggcacgcctaaggctaagacacagatcttaacacgatggcatgtactgacacatgtagttgtcagaattcacatgggtggatactgacttgtgtgttgatggcagctagtgacatgacacctgcctgtgtgccattgacacatgcatgggcatatatagatgtgggcacacgcatctacactcggtgtgaaagtgtccatctgagccccatacatccaccctccaggctggagcccctcgatgggctgaggccattctgattaagttgtgtcccggtatctggcagagaacagacgcatcataaacgcttgaatgagggccaggcttggtggctcatgcctgtaatcacagcattttggaaggctgaggtgggtggatcacatgaggtcaggagttggagaccagcctcgccaacatggtgaaaccccgtgtctactaaaaatacaaaaattagccaggcgtggtgacgggcacctgtaatcccagctactcaggaggctgaggcaggagaatcccttgaagctgggaggcagaggttgcaatgagctgagatagggccattgcactccaacctgggcaacaagagcaaaacttcatctctaaaaaaataaataaatgctagaatgaggctgtgtgcagtgtctcacacctgtaatcccagcactttgggaggccaaggtgggaagattacttaagtctgggagtttgagactagcctgggcaacatactgagatatcttctctatctaataaaaaaattaaatgcttgaatgaatgaataaatggcaacaaatactttgaacagacgagggccaggcactgtgataagcactcacatgcctgatctaattaatccataccacagtctctatgggtaagaactaatgatcccactatacagatgggaaaaactgagtcataaagacaggatgtagctttcccaaagccatatgccacgtaagtgacagagcctggatttgacccaggtctctcaaactcaaaaactaatgttcttaatcactgccccatcctcgttatgatgggacaaccctctctcccaattcctggattcctgggacacaccaccaaactccttccagtgcaggcgctcagcaagctacaagaaagtaagacagcctttcatcatcaaaacagaggaggccgggcgcggtggctcacgcctgtggtcccagcactttgggaggccgaggcgggcagatcacgaggtcaggagattgagaccatcctggctaacacggtgaaaccccgtctctgctaaaaatacaaaaaattagccgggcatggtggtgggtgcctgtagtcccagctacttgggaggctgaggcaggagaatggtgtgaacccgggaggcggagcttgcagtgagccaagatcgcgccactgcactccagcctgggcgatacagtgagactccgtctgaaaaaaaaaaaaaaaaaaaaaaacagaggagaaaagagagaaactttaaacccaacgaagctcagaagttctgtgtcagggctgggtgaggtggcacatgccagttatcccaatgctttggaaaaccaaggtgggaggccaggatttgaagaccatcctggacaacacagcgagaccccatctctacaaaataaaaattaaaaaattagccaggccctgtggcatgcacctgtagtcctacctacgtgggaggctgaggtgggaaaatcacctgagcctgggcagtgaaggctgcagtgagccatgatcacaccactgcactccagcctgggcaacagagtgagatgctgtctcgaaatgataatattaaagagctacctgaaaaaataaaaaattcagttcctcagtcacactcaccacattacaggtgctcagtagccacatgaacaatttagatacagatcatttccatcatcatagaaagttctgttggacagcatggtctagcatgggtgtccaaccctttaaatggactgactcttctgcttatcttttttttatttgtctgttttttgagacagggtctcactctgtggcccaggctggagtgcaatggcatgatcttggctcactgcaacctccgcctcccaggttcaagcgactctcctggctcagcctcctgagtagctgccaccacaggcgtgcgccaccacacccagctaatttttgcatttttggtagagacggggtttctccatcttggccaggctggtctcaaactcttggtctcaagtgatacaaccacctccttttttgcttatctgtggtagtagatatcacgaaaattatacacagaccttttgagacagagtcttgctctgtcgccaggctgaagtgcagtgccgtgatctcagctcaatgcaacctccatctcctgggttcaagcaattcccctgcctcaaccctcaacctcccgagtagctgggactacaggtgcacgccaccatgcctggctaattttttgtattttagtagagacagggtttcaccatgttggccaagatggtctccatctcctgacctcaggtgatctgcccgcctcagcctcccaaaatgctgggattacaggcatgagccaccacgcccagccatggaccttttttttttaagcgatcacctatcattagggtattttatgtgagatccaagacaattcttctgcttccaatgtggcccagggaagacaaaagtttgggcacccgtgatagtctaccccagtctatatatgatcgattcttctttatggcattgtttaacatattcctctgttccctgcctttcctgtacaccagtagttacacgtggaagccgaataatttcaggttcaattattttggtgaaaatacttcctaggtctgcatccttccaccagcagacacatcaggtctcgtctttattgtgtgagactcacatcctattggccacaggaagtcacatgaccaagcctgacatcagtgagtcagggaatgtatttgacatactcaagaggacctgtaaagtcacatggtacagtcatggatgtataattctataacaaggaggaagtggagatttggaaacaataattcaagctaccatgagggcgtttttgttttgttttgttttgttttttaatcaaatgaacttttcagaaatgactcggtcagatgcggtggctcacgcctgtgatcccagcactttggtgaggccgaggcaggcggatcgcctgaggttgggagttcgagaccagcctgaccaacatggagaaaccccatctctactaaaaatacaaaattagcggggcatggtggggcatgcctgtaatcccagctactcgggaggttgaggcaggagaatcgcttgaacccaggaggcagaggttgcagtaagccgagatcacagcactgcactccagcctgggtaacaagagcgaaactctgtctccaaaaaaagaaaaagaaatgacttacgcctgtaatcctagcactctgggagctgagatgggaggatcgcttgagaccaggaggtccagaccagcctgggcaacatggcaagaccctgtctctacaaataattttaaaaattagctgggtgtggtggtctgcgcctgtggtcccagctactcaggaagctgaggcaggaggatcacttgagccctggtcaaggctgcagtgagctgtgttcatgctacagtactccagcctgggcgacagagcaagatcctctctcaaaagaaggaaataagccagatgcagtggctcacacctgtaatcccagcactttgggaggccaaggcaggcagatcacctgaggtcaggagttcgagaccagcctggctaacatggtgaaaccccgtctctactaaaaatacaaaaattagccggacatagtggcgcacacctgtaatcccggctactcgggaggctgaggcacgagaattacttgaatatgggaggcagaggttgtagtgagctgagattgccattgcactccagactgggcaacagagtgagactccatctcaaaaaaaaaaaaaaaaaagaaatgaaggaaggaggaaggaaggaagggaaggggaagggaaggaagagagacagagagagaaggagaggaagggagggagggagggagggagggacggacagacggacggacggaactaactctatgagtcacagagaggttaagtaatttgttcaaggttctgcagctggtaaatgatgggattagaatgcaggcagcctggctccagagtccactataggaaaacattggagcccacttaatggggctgctgtgacattccaatgtgaacaggaatgccaagggctcaggacagcgcttggcacaggatctgtgcatcatgcttggaactggtgctgtttatttccatcacctgattctgggttggccttggcttgggtttggagggattttctgcccctggcagtgttccaggggtggcagctggactttttaaatccaaggaccttgttaggagtcagagttgggcaaggggagactggagataaaatccgatcacaagaggtagctatgaataggtcaggagcaattctccccagccttgagcagtagggaggatgagtcaacagaagtgaactcacccttcctacttgttatagaattatacatccatgactgtaccatgtgactttacatgtcttcttgagtatgtcaaatacattccctgacccactgaggtcagggttggtcatgtgacttcctgtggccaataggatgtgagtcatacccaataaagataaccagacctgatggtaagtagaatatccatgaagatgtgcaggagaccatggccagcaacactggcttatcagaactgggttcatgcacaggtctgagtttttgttgctgaaccctctttccctgtcaataagacaagcatttattccccagtatcccaaggcctatgactccacctccaggctgccactcataggtggagctcacctggcacctgcggctggaacatctacttatcacctttccatgtggctccttgggcttcctcacatcatggcagctaggtcccaggggctatgggacctagctagatattgtgcttcatagctagatacggtgctatgaagagtgtggcagttgacatttcctggaaatggtcacagtaatattttgagtctcacatgctctcccttgtggtagcttgcccctcccatcaaaaggcagagtattttccttttcttgaagctgggcagaactttgtgattgccttgacagaggggaaaaaaagggttgggggggtgcagaagtgacactatatgcctgtgtgacttccaaggctaagtcataaaagcagacacggctttttcttgtcctttcccttcccttcccttctctctctcagcctccctctccctaccccttccccaccactggcctctgggacctagctgccatgatatgaggaagcccaagcagccacagggaaaggtcacaagtagaagttccagccacagggcccaggtgaggtcccagctgataggcagcatcaactgccagacaggtgagtgagaaagcttcagatcattccagtccacagccttttaagccaccccaaggggtgtcaagtgcagcaaagatgagccatacctgctgagccctgcccagattgcagatctgtaagcaaagcaaatcttttcactggggtggtttgtaaactagggaagttccagctctttcctagttgaagacttttcccttctttaaaacctaactcaggccgggcacagtggctcatgcctgtaatcccagcactttgcaaggccaaggcagttggatcacttgaggtcaggagtttgagaccagcctggccaacatggcaaaaccccatctctataaaaaatacaaaaaaattagctgggtgtgatggtgcacacctgtagtcccagctactcgagaggctgagacaggagaattgcttgaaccggggaggtggaagttgcagtgagccaagattgaaccacagcactccagcctgggcaacagagtgagactctgtcagaaaacaaacaaacaaacaaaaaacacctaactcagatgttgctttcctgcttaaaagcctcccatgttcccatctccttcagagtaaaagccgaagtctatacttaatctaaaagatccttcctacatgatctgccaataccacggtttcctgtcaacattgactctctgacctcttatcccactctccccatccacccctctgctccagccacactggcctccttgctgattcttaaacttacgaagcaagtcccacctcagggcctttgcacttgctgttctcccagctcagaaggctcttcccccagaactctatatagctcccacctcatgatcaggtctttgctcaaatgtcatcttctcaataagcccttccatgaccacactatttaaaattacaactccccctccctccccacaaaataaatcactcccatccttattccctgggttccatttctgcagagcacttagcataatctaatggattgcatatttcacttatgtttcttgtgtataatctgtctgcccaactagagtgtaagttccatgagggcaggtgagggatctctatctgtcttggtcactgctgtatccccagtgcctacaacagtgccaggcatatgttcaccactctgtgaatatttgttggtataaatggaaggaatgaatggattaatgggtgcatatattgttggaagaatagatccaagggaaaggaaagaggagggtaacaggaaaagagcccaactcaccctaaaaacatgaaggcttccatttgccaaaggcagaagatacttaaaaaaaaaaatcttatctccacaaccagatgatcaaccaactaatcaatcactctccaaaccatgtccctcttgcctcctaaacatttcttgtttcttccaacattttattatgagcaattgcaggcatgcagaaaagttgaaggattttacaatgaacacctttaccccaatcacctagactccactctaaacattttactgtctttgcttaattatatttctatacatttatccatccctccatccatccctccatccctccattcttccatccacccattactccatccatccatccattactccatccattcatctctccttccatccattacaccacccatccatccatccatccatcacaccatccatccacccaaccatccatccatccatttatccatccctccatccatccctccatccattcatctctccatccatccattactccatccattcatccatccatccatccatccatccatccatccatccatccatccctccagcttaattttgatgcagttcagtgaaagttgcagacaccagtacactgccccctaagtccttcagagtgtctatcggtatttgtttaccattctttattttctattttgaagtaaagtttacatacaagatgtgcaaatctgaagtgtgccattcactgagttttgacaaattcatatacccgtataacgcaaacttctgtcaagataaagaagcactcccctgatgttttttccactatacatgagccttacttgttctggaatttcatttaagtgaaattgcataatacattctttactgtgtctagcttctttcgttcatcataaggtttttgagagtcatccatgatatatgtgtatcaatacttcattttttttttgttgctgatagtattcactgcatgggcataccacaatttgcttatccattctactaatgatgaacctcaatatctcttcaatccaccccctttccttcatctccatggccccttccctggcccaggcatctcttctttacacccaggtctccactccagcccagcctccttcttgctctctgatctctaatctcactccctgtcatccaccttccagaggattttgttttgttttgtttcgttttgttttgttttttaatacagggtctctgtcacccaggctggagtaaatggcaggatcatagctcactgcagcctcaacttcctggattcaatcaatcctcttccctgagcctcctgagtagctgagactacaggtgcatgccaccatgcccagctaatttttaaattttttaaagagatgggctctcactatgttgctcaggcttgtctcaaactcctggcctcaagcaatcctcctgccttggcctcccaaacctgggattacaagtgtgaactaccacacccagctcccagaggaatccttatcaggcacatgttgtgttctgtcctgctcaaaactcggccatggctccccagtgctccctggggaatgcccgagattctttaatggctttcagacttggtttgatctcaccccgatgcacccctccaccatcacttcccatctcctctctttataatccaggctgcaaccactgtctacctgtcagttccctcaatgtgccaagctctcttttgcctccaaactgttgtattatcttccctttgcctacaatacttttcccccagccctctcattcatgtatttatttattttacagatgaggtctcactctgttgcccagactggagtgcagtggcacaatcatagctcattgcagcctccagctcctgggctcaagcaatcctcccgtctcagcctcccaagtaactgggactataggtgcacatcaccatgcctggcaaagttaaaaaaaaaaattaagagatagaggccgggccgggcgcggtggctcacgcctgtaatcccagcactttgggaggccgaggcaggtggatcatgaggtcaggagatcgagaccatcctggctaacaaggtgaaaccccgtctctactaaaaatacaaaaaattagccgggcgcggtagcgggcgcctgtagtcccagctactcgggaggctgaggcaggagaatggcgtgaacccgggaagcggagcttgcagtgagccgagatttcgccactgcagtccgcagtccagcctgggcgacagagcgagactccgtctcaaaaaaaaaaaaaaaaaaaaaaaaaaagagatagaggccgggtgcagtggctcatgcctctaatcccagctctttgggaggttgagatgggcggatcacctgaggtctggattttgagaccattttggccaacatggtgaaaccccatctctactaaaaatacaaaaattagccaggcgtgatgtcagatgcctgtaatcccagctactaaggaggccaaggcaggagaattgcttgaacctgggaggcagaggttgcagtgagccaaatcgcaccaatgaactccagcctaggcgacaagagcaacactcagtctcaaaaaataaataaatacatacataaataaaataaaaattaagagatgggatcttgctatgttgcccaggctggtctcaaactcctggcctcaaacgatcctcccccttcagcctcctgagtcattgagattacagttgagagccactgcactcggctgtccccaaccctctctctgcttgcctcactgttattccttcttaagtctgcatccaaatgccccttccacaataaacctttctgacagccccgacagggtgggtaaggtgcttccaccaagctcccacagttcctggcagttcagaccactctacaatttaatattaaaaggtcttaaattcccacttaacttcagttccaggtacaaaacttgtctcttcaaacaagaacatatcctttagcaaaagttggaaatcattttaacggacacatttcccttattgccttagctgctgggaacctctgagcgaagtttaacgctaacctacatcgtagagagacacctgttgcatctctgtgtgtaaagtgttagttctattttaatgtttgttgaaatagtgccagcttttcttgggcactgtaaatccctccgattggctctctgctgtgactccctcataccaaaatcaatgagttcttccactgaatctatcatccaactactgccccctccaaactcttccaacacacccactggaactctcgttgtcttgttaacaaccactccccttcctcagtttctcccttgaacatctcttctaccccatgtccttacctaaaccctaagaagctctaagaacaatgcttcctctgcagccccttctactatttatttatttatttatttatttagagacagagtcttactctgtcactcaggctggagtgcaatggcatgatcttggctcactgcaacctctgcctcctgggttcaagcgattctcctgcctcagcctcccgagtagctgggattacaagggtgtgccaccacacccggctaatttttgtatttttagtagagatggggtttcaccatgttggccaggctggtcttgaactcctgacctcaggtgatctgcccgcctcagcctcccaaagtgctgggattacagtcgtgagccaccatggccggcccccctttataattcagactgctccttttctaacatcccacctgcctctacactgagggttgaaagctgatttctctatcaagattcttttgggtgcaagtatctaaaatccattcaaacgaatctaagcacaaagcaaataaggcaatagtgaatgaagcaatatttgacaaaagcaacagcaaaaaaaaaaaaaaaaaaaaaaaaaagcccattgtgggtttcatttgaaaaatccaagaattaaactggagttcaggtatggctggatccaggcactcaagtgctggtgtcaaaactgcctttcacaatcgttcatttctgcacaatctcttttgcactgaacctcatctcataaagcctctcctctctttgtggcagtgtgagccccatctgctccatctgcccagcaattccagcagacatagaaaatcctctttcctaatggtttcagcaaatgtctcagggttgattctcattgggctaaattaggtaacatgccttccctgaaccaatcactgtggccagggaagcagactcaactgattagccaggtttggatcctatgtccatccctggagctggtgaaggcagagcagtggccaagccctattcaaattaaatagatgaagaggacagagaagtggtttcccaaaagaaaacagagtggggaactggcgtgagccggggagccgtgtggattcctggaggaagagtgtgctaagctgtgggaacagcaagtgcaaaggccctaaggtgagcaacttgcctggcaagttcaaggttcaacaaggccacttctgctgtagtatcctcttccctgccaaccaaatccagaatagtggtccaacacacacacacacacacacacacacacacactctgttccttatccaactgtaatgctttcacccttgcttggtacctttgtacttctcccttcatagtcgactagttaaaaaaaaatacatttctcggctcttttttgaagtaggtgtgattgagttaaaacatatttacttgacataagcttaattattcatcaatgggaacctgaaaagggagtcagagaggccaagaggttagggtggagtagagggggtagggaaggtaagctggggtgcagagggtgcagactggaggaatgggggcgaagtggggtatgggactggggtggcagggaggggctggggagagagagagaagggtaggtgccagagggccaaggattgtggaactggggtggggttgggagttggggggtggggaggagatgtggggtactctgtgaataccttagaagggatagagaaggcagggctaggggtttggaaggggtgggattggaggtcagaggggctcaactggggttaggaaatggaaaggtgagaagaggtgggggttagaggctggggactggggtccagagagcagagtgaactgagtgggttcagaagagtactggcgttggcacttcagaggctggactagagaaggcgcgttcagccgacggtgcgggatacactgccgaggaagtccgcggcgaggggcgtggttggggggtgtgtattacacggtatcccccccttgcctttccaagtctttccctctggttccgcctccttttcaggagtgacataccgttgcccaatcagagcctcaggcctggcgtggcacagccaaccgcgcggcgtggggaggagctggggagggggctcgcaaggccggggagggggctaggggcctccgagggctccggagcggcgactggcgagccatggcgctggggctgcagcgcgcaaggtactgaagttcgggggcaggagttctgggaattggggggctctcctcctggagacccctgagctggattgttggggggggtggggttcgcgggtgcgagccaagaacgccccggggcgcgcagttggaggcacatccccaccgcactctccacccttagggactgcaggggtgggggattccctacgtctctggctgccccgcccctctggccaagagcggcttcggggttcccgatttctcgctacccaaggctcatttaccctcctggttgggggtggaacttgggattcctgataaattaggggtgattgcatttgagcagtccccaggcttctgcgggagatattcgccctccacatattgatccctctggcctctgaaccccccaaaattgagggtattctttgccaccaggtgcctgggatcctaggtgatatgggatacccctaaatggagccttcccacatatagggagtcccttggaatggcattcagctcctgagttcaagagaggagagatctcctctaatagtatgcttcctgacacagtctcctaaacattgggtttccctagaaatgggcagaggggagcccctttcagaagccgtctgggacccttcccaagagactttttgtatcctttcaaaagccagagtcacccccttaaataacagggaaacaagctggacccacttcccaaagtccagcccctcatctcacccctgcacccccatcctgagagacaggggagcctcatccaagctttattttggggagactccatggcagggtgctgtgagcctgcaggctgtgatgggaacgccccctgccgcagtactcagatggggtcatcccgggcagagggtgggtttctgggttcacttgcccagcaggtgcagctctgctggaacacaggggaacctgtgccctggggccgctgccggggggttttatctggccatgttcccatgggaccctggaaaatgttctaggtcctcagctttccctgtccaatgtgaggcacccagtaagcctcacccccttccctcctccctggcttctcaggcctgattggatccatgcacaccccatgtttctaaccgcccccatcctctcccctgtcccctactctattccaggccctggctctgggcctaacaaggaactctatcccaccccttttgggccagctgtcgttccgcccctctcagcgccccctcctggctgggtgggggcccctcttggctgagctcgggtgccccccctccccacccaaggccggccctttcctgtggagtcatctcaccgccgtgcgcacccactcgtaactcgcacccgggtcctggctgcaccgcatcccctcctgcaccccctggatggcccttcagccaacgggggcctgggcgatggtgagtgggcccccaacacctcctttcccccttcccttcctctagctggggctggctgccatcccactgtggccaaggatgctcttgggaagtccctggtgggtacggcttgcagcccagagtgcccagtgaggtagtattcccggagaagataggattttggggaccagcaccctaccagattaccatgtccttgagaacaggcagagtcggggggcagagagactcccccagacccccatgccaagtccctttgcaaacccaaaccctgcctctggtctctcaggacacctctctgcaatgccaaaaggcatccttgcccagctacaacctaaacccccacccaccaaatcctctgtgcttttcgtaagacgcccccccccaatacccagctgggtgtcagaatagaaaagcccagaagtagccctgaatgtgggcagggactgcctgcttttattatgccttcctcatgggtggcaaattcttcagggcagggaagaggtgaacttctctccttcctggttggaggggggcactgggccccaacccccattctcaggcctcaccctgagcccgccaggccctggccccaccccctgttcttggctggaacacggaggaagggtggcagggttccagctgcacgtcccaagctgggcagagtgccagggggctggaccagggctgggcatggggccagctggggcgatctggaggcagcaggggtgtgacgggggaagggaccgaggctgctaggcaaaagaggggtggggcaggggcctcttgggtgggggccacacctgccaagagcacagggcccaaagacagggttcaaatcccatctcacccacttcctggtggtgtggaattgtgtcagtgactgccgctctgagcctcactttcagatcctggaaatacgggcaggccgggtgcggtggctcaggcctgttattccagcactttgggaggctgaggtgggcggattgcttgagttcaagaccagcctgggcaacatggcaaaatctcatctatactagaagtaagcaaattagccaggcatggtggtgagtgtctgtagtcccagctactcaggaggctgaggtgggaggatggcttgagcctgaggcagaggttgtaatgagccaagatcaggccactgcactccagcctggacaacacagccggaccttgtcgcaaaaaaaaaaaaaatagaaaaatagaaaaaaaaaagaaaactgggtatcacactccctttccaccaccccagatcaagatgaggagccagtagtgaggaagcagacggtggggggcgggacacccaacaggtgtgccacaaactgagctcaagtcagagtagacagacctggcttgaatcctgtctctgctactaaaagctgtgtggcttcagtttcatcacctctttgggcctgcttcctcatccggaaaatggggaaagtcattgcaggaacatggtcggattcactgagaagtggttgaacatagttcagtgtcaatggagggcgctgggttacttgggctggggatgccattgctccaaatctcagtttctgcctctttaaaaggagagatcacttctcctgctcaatagggtagtagtaaggacttaatgggttctctagctccgtgagtgttcaacacaccaatgctatcattattacagtatcactgttatttaatcctccttttaagatgcttgtgtaaaaaccatgtatgtaattgcatgcacacaccacactatggggcgtgtagagtaatccacaggttactgtaaagcccaagaagctcctaagcccatgctttccatctctgatacgcacagagggagaacagtaagtctaaccttggccgggcgcggtggctcatgcctgtaatcccaacattttgggagtccgaggcagacagatcacctgaggtcaggagttcgagaccagcctggccaacatagtgaaaccctgtctctactaaaaatacaaaaattacccaggcatggtggcaggagcctgtaatcccagctactcaggaagctgaggcaggagaatcgcttgaaactgggaggcagaggtgacagtgagccaagatcaagccactgcactccagcctgggcaacagagcaagattacgttcacacagcttataagcagtcacacagcttgtaagtagtggagcttgtaagtagtagcttataagtagtggagttgataagtagtagagtcaggattggaaccctgagccagaggaactagcccccagtctgtgtaatgggaaagacccacacttcccagtagaacatccagagggcaggctgggagctggaaggagggtccctccgcagccaccagctggctccttctatggaagaagcagcccagccacagaggattacagagcccagctgcctgggaggtggggcactggccccacctccctgccagttcccactccctgttccctgtcgggcccccagctccgtgaggccctctcgcccccaccctctgggcaggaagacaaacagggctggaacagaacaggacggaatgtcctctcaggcaggcaggactgaggcccctgcccccaccagccaggaaggaggggacggggacaggggccgtatctcccctgctccaaccctccatccaaactgcccccttctgtgcctccctccctgctgtactgaggattttattttccttctgtctccagacaggaaaatatccccttgccctggggggtggggccgcaggtctcttgcctgaggctggggttgatgccaccccagaagcaccctctgctcttgaatttaagaagggacagtgtcccctcctagaggttctgcttccctcggatgggtcccaaggaggggatgagaaaaagcctgaagactggaaactcaccgcccagattcaaatcccagctcagccagttgttggctttggggcttcttgggcaaggacttcacctttcagaagctgtttccccactgtaaagtggaagtttaaaatgcccccctccgccgggcatggtggctcacgcctgtaatcccagcactttgggaggctgaggtgggcagatcacttgaggtcaagagttcgagagcagcctggccaacatagcgaaaccccgtctctactaaaaatacaaaaattagccgggcgtggtggcagatgtctgtaatcccagctactcgggaggctgaggcaggagaattgaacccggcaggcggaggctgcagtgagccaagatcgtgccattatactccagcctggctgacacagtgaaactccgtctcaaaaaaaaaaaaaaattaaaaattaaaaattaaaaaataaataaaaaatgaaatggctccctcctaggggtcccctgaggattggatgaatacatgtagaatatatagtacagtggcaagcacataaatgcttagcaaatgacagctgcctattactaatagtaatatttatcaatataaatgtagatgagactatatataccatatactacactagattatatatacaatatagtagatgtaacacatcatataataattttttattttgcctatttttgttaatttgttttttgtcttttttttgttttttatttgtttgttttgagacggagtctcactctgtcgcccaggctggagtatagtggcgcgatcttggctcactgcaacctccacctcccaggttcaagcgattctcctgcctcagcctttcaagtagctaggactacaaggtgcccaccaccacgcccagctaattttttgtatttttagtagagacagggtttcaccatgttagccaggatggcctcgatctcctgacctcgtgatccgcccgcctcggcctcccaaagtgctgggattacaggcgtgagccactgcgcccggcctgttttttgtctttttttagagacggagccttgctgtgtcacccaggctggagtgcaggggcacaatcatggctcactgtaacctcaaacctgggttcaagtgatcctctgtctcaccctcccaaattatagccgcttccggctataattttgtatgaaagaggccaggcgtggtggcttacacctgtaatcccagaatttggggaggccaaggtgggaggatcacttgagttcaggagttcaagaccagcctgggcaacaaaatgacacactgtctctacaaaaaatacaaaaattagctgggcgtgctgatacgcacctgtggtcccagctacataagaggctgaggctggaggatggctttagcctaggatactgagtctgcagtgagccatattcatgccattgcactccagcctgggcaacagagcgacagcctgtctcaaaagaaaagaaagaaaagaaaagagaaactttgggttcagaaagacctggagtttgaatttgaagacagtggcagaaacagggagaagagctaaaattctggacataaatccaggcccatagagatagagaaaatttgagaatttaggtagaccattgtttaaaggcaggcttccctatttgtgggcaggcactgcacctctctgagcctcggtgtcctcatctgttcaatgggacgttatcaacttccttctgggtggcctgagcattaggcgggttaatataagtttcgcacttggcactgggagtgacaaaatagtaaaagctggataagtggcagatatttctgataaaacgacacttattcttccaaccccacatgcaaaatgtaggtatctgaagtggattacagggcagggtgagtggtaaacagaacaggttgctttgctgtgtcaccctggcgggtccctgcccctcttagggcccctgttggtggttcatcgttagactttgagatctatgttccaagattcacaggacggctcagttgagggaaaagggcagaggaggtgattctgggaaactgcagggcagggggcctgggaggctgtaggcctctccttcgtgggccctccctcctctggcccctggccagctcagccagccccctcccagcaggggccctccctgtcccccaggcgtccctagcctgggaaataaactgcagataagtcagggaggggacagagcggccctaggcgcgccacagagaggagcgaggcgccagaggcaccatggactggcaagaccacaggtaaaatcagggctaggaagggctccacagtgtagcccttccaggcccagggagcgccgcgaactcgacagggccacacatcgaggcctgcgcagccgcggcccagcactccacgagccccggccccacgtggcagctccccacgtgctcgtcccgtcctccttttctctttcccgagtcaccaccagtgaatgctgcccatgccctcaggtcgaccacggagctgcgcaaggaaaagtcccgggatgcggcccgcagccggcgcagccaggagaccgaggtgctgtaccagctggctcacacgctgcccttcgcccgcggcgtcagcgcccacctggacaaggcctctatcatgcgcctcaccatcagctacctgcgcatgcaccgcctctgcgccgcaggtgagccccgcccgcgggaattcccgtcttggtcaggccccgcccacggaaaaaaactacatcccagggaggcccctcctccgggaagccttattctgacaaagccccgccccctggtgtcgtttttttcggcggagccccacccccctggaatcgacttccccggggaggccccgccccctttgagttcctggcctgctgggagtcccgcccccctcgaagtctatcacttgtgaggccccgcccctggaacgcgccctttggaagccccgcctccttaggactcagaaaatccgctaacccttcaactcttacgatttggtcctctaggagactctcccagatggataggccctggtctctcataatatatccactgggaggctgcgccgcccaacttttcgttactgtatctgagagtcccttgtcccttccccacccctctagttctacatcacttgttctcttagtaggcatctccttgaatttctacccagttagaattgcatcctgcagcgggctttgccacgcacgtgcacgcgcgcgtgcacacacacacatacactcacacataaaccccgtggaatcccaggaccctgaaagcgggggaagtagcgttattctctgggaggctctgtccatttgacttccctgccccatagaattttacttttcttggaggctttacccccttagaagtctgttccctgggagtcccttcttctctagagttctgtccctctggaaggtcctgccctccatgagtttgaaccccttcgaggcttccccctcatctctatattacaattccccttaggccctggccccttcatattttgaccctggggagttccatccacttagaattctgtcctcctaggaggcccacccacatccttagaattctgttcccttgggagactcctacttccttagaattctgccaccctgggaggccctgcttctaattccagtgcttcttggtcctgctttcttccttgggaatccaggccactaggatgtacccccacttccttgggggtgcatgtaagtttctctgaatgaggaaaggcagagggaggctagcccagggtcagtccataattcagaccataactgactagagatgcccccatccccctgccccgggcaccaggggagtggaaccaggtgggagcagggggagaaccactggatgcctgctacctgaaggccctggagggcttcgtcatggtgctcaccgccgagggagacatggcttacctgtcggagaatgtcagcaaacacctgggcctcagtcaggtgagaggagctccttgctctgtgcctggccctgtactggtgatgctggggatacagtggtgaccaggacagccatagccctacctttatgggactcacaatacaaaggggatataggtatgtcactagacaggaagacccagaatggtcagggctgggatgggacagtctagggggctgtgagagcacaggggtggggtgtacctgacccagcctgagtgggaatggagggcttcctggaggagaagatatctgagctgaaatctgaagaacttagccggtcaaagggtatggagaatggatgggatcagtgaagatcaggaatgtacatggtagagggaacagaggaggcaaaggccaagaggtgaggaaaaaaaaacagaataatttggggaaataaagttggccacgtgcagtggctcacacctgtaatcccagcactttgagaggccaagatgggaggatagcttgagttcaggagttcagtgtttcacctgggcaacacggcaaaaccctgtctccaccaaaaatacaaaaaatttgccagatgttgtggcacatgcctgtggtcccagctacttgggaggctgaggtgggaagatcatgtgagcctgggaggtggaagttgcagtgagccaagattgcaccagtacactccagcctgggtgacagagcaagacccagtcgcaaacaaacaaacaaaaaaataataaaaagtttatcctcctaggtgcagagtgcaataggagaagctgagagacaaaaggctagagaggtcatcagggtagactgtggccaaatttaaggccaaattatctttatctccagggccccggggagctatagaaggattttaagcagtggagaggttgtgccagaaaggtagaatcagatttacatttttgaaagatcctctaggtacggcatggaggtagatttggagggagtgagatcagaggttgaaagatcagcaatgggtagatgccaatctcaggtgggagaagaggaataggggcagggaccatggggatggaaagataggaacaagagacatttagaaagtagaacttacttttttaattaacatggaaggcttcatgcatttgcatatcatccttgtgcagaggccatgctaatcttctctgtattattccaatttttagcatacatgctgcctaagcaagcatagaaagtagaactaactttaattcatccttacagcaaggcctacaagaaagttcccattcttttttctatctcacataaataggctccatagttggtatctgttccttttctctgcctcgttaccccactcctggtaccaatttctctgttagtgtgagtgagctttttggacccagagagatgaatgtcccgaggttccaaagctaggaagtggcacagccaggatttgactccagctacaagagatgttgtcagaggagcgagatctccctctttccctattcaccagcaccagcaccattcacatggtgagccaatagggtccaccttcatctgtgtcccctcctcccagcaccacgctcatttcctaaattgaaatgaagaattgggttttctgcctgccagaaaagtgtgatttgaatggagtctcatctcggggccttgcgcttactattcccctctttctagaatactcttactccagggggccataaggccacctcacttgctttgttcagcagctttttaaatgtcacctcttcaaagaaactgtctagaccactctgtctaaagcagcctcccatcattgcgttaccttgtactgcttttgttttcttcatgttacttgttatattgttgttatttgttctttcattcactgtctgtctcaccccactggccagtaagctcttcaaggcagggatttgtgtgtgcagtcaccgtgtccataccatttagaagagccaggtgcagtagctcccacctgtaattccagtactttgggaggccaaggtgggaggatcacttgagctcaggagtttgagaccagcctgggcaacatggtgagacccccatttctacaaaaaaatttgtaaaaattagccaaaagctggatgcggtggctcacacctataatcccagcactttggaaggccaaagtaggcagatcacttgaggtcaggagttcgagaccaacctggccaacatggtgaaaccccgtctctactaaaaatacaaaaattagccgggtgtggtggcacatgtctgtagtcccagctactcgggaggctgaggtgggagaatcacttgaaccagggaggtggaggttgcagtgagctgagatcgcaccactacactccagcctgggcaacagagcgagactccatctcaaaaaaaaaaaagaaaagaaaaaaatagccaggtgtagtggcatgtgactgtagtcccagctactgaggaggctgaggtgggaggatcagatcgcttgagcccaggaggttgaggctgcaggaagtcatgatcgcgccactgccccgctgcattccagcctgggcaacagagcaagacctgtctcaaaaaatagatagatagacagataggtagacagacagacagacagacagacagacagacagacagacagatagatagatagatagatgagggcctggcacttggtatgcgctgaataaatgcttgctcagtgggtggatggatggatggatggacaaatggatggataaatgaatggggagactggtgaaatcatccaggctcatgaattggagcaggggaatgaggatgggatggaggagatgggtcagaagccctggtagacccccacccctctcatccctggcagctggagctcattggacacagcatctttgatttcatccacccctgtgaccaagaggagcttcaggacgccctgaccccccagcagagtgagttccctggaggcctctgtccccaccatacagaggaggaagctgaggctccacccctccctcagcatatccccacctcctgtggaacaccagactaagacaagtaggaagaggagagatggccctgccctggggtctatggggacaaagaccctgccctgggggggtctgaggggacacagccctgccctggggggtccaaggggacacatactacccctgggggaccctctctggttccaggtcccaattgttgggatggagctggggaggcctgagcagccagggtgccggagggcactgggcctgtgtgtagctgcctgtgacctccccgctgcccccgggcctccccagccctgtccaggaggaaggtggaggcccccacggagcggtgcttctccttgcgcatgaagagtacactcaccagccgcgggcgcaccctcaacctcaaggcggccacctggaaggtgcgtggggccgggccagaggagggcggggacgctggggctgggtgtgagccctgaaagatcttgaagggtgctggagtccaggcatctcctaggctggggaccctgcggggctcactcaggtcaggtctagcgggtctcagggcatcgaggagcatgggtgtctgtggagttgggacctggggctcctgtaagctctcttaggatgggttcctatgggcctggggctggggatcctcagtccctttgaacctgaagtcttcatggggttggaatctcagctccctgatgggccctcaggacgcatcttccaaccccatgggtggtctcaggcccagaggcaccactgccttgtcccctcatctcggcccccaggtgctgaactgctctggacatatgagggcctacaagccacctgcgcagacttctccagctgggagccctgactcagagcccccgctgcagtgcctggtgctcatctgcgaagccatcccccacccaggcagcctggagcccccactgggccgaggggccttcctcagccgccacagcctggacatgaagttcacctactgtgacgacaggtgggcaggggccccctcttccgtctgcccaagttcaagtgctgtttccctccccacctccacactcccgcatttctctctctccttctctctctctctctcacttcatccatctctctctctctttgtgtgcctgcctgtctctgaattttctacatgccttttatatcttttctttttttgtaaaatcgctgccttgccatttgcccagactgctctcaaactcctgggctcaagccatcctcccacttcggcctcccaaagtgttgggattacaggtgtgagccaccgcacctggcctccttttatctttcattctctttctgtctctgagtctttctcttagtgtttgtctctctttgtcccttttcttaaatgagtcaatttgtgtcaagcagttaatatggtgcccagcacacaggaagcattcaataaattgtcgataggccaggcacagtggctcacaccggcagtaccagcacttagggaggccgatgcgggagaattgcttgagaccaggagttcaagaccagcttggacaacatagggagaccccgtctctacaaaaaaattagccaagtggggccgggtgcagtggctcatacctgtaatcccagcactttgggaggccaaggtgggtggatcacctgacgtcaggagttcaagaccagcctggccaacatggtgaaaccccaactctactaaaaatacaaaaattagctgggcatggtggcgcatgcctaaaatcccagctactcgagaggctgagactggagaattgcttgagcccgggaggcggaggttgcagtgagccgagattgcaccattgcactccagcctaggcaacagaacaagactccgtctcgaaaaagaaaaaaaagaaaaaatttgtcaggcgggtggcatattcctttagtcccagctacgcaggaggctgaagtgggaggaataattgagcccaggaggttgaggctgcagttagccatgattgcaccattgcactccagcctgggcaacagaatgagacactgtctctcaaaaaataataataataaataaaataaactgttattatttgttcaccctctatccttcctttcatctctttttctctccccctctcttccttctgtccttctcttccttcttctgtcttatccctcgccctggtgtcatgcttaggaatggtgactctggattcagcctgcttgagtgtcagtcttggctgtgtatccttagccaaatgacttcacctctctgtgccacaatttcctcacctatactgtggaatcataacagaacctgccttgtacagtcgttctgagcagctcagtgagtttcccggtgcaaagcacaagtatctaatttttaaatcattattgtcatcattactttttgttgttgttgttgaggtggagtcttgctctgtcacccaggctggagtgcagtggcaggatcttggcccactgcaacgtccacctcccgggttcaagtgattcacctgcctcagcctcccgagtagctgggatcacaggggcctgccaccatgcctggctactttttgtatttttagtagagatggggttttaccatgttggtcagtctagtcttgaactcctgacctcaggtgatcggcccgcctcggcctcccaaagtgctgggattacaggcgtgagccaccgcacccggcctatcatcctcattactttttatttattttcattcttctctttctttttgtgtttttttcttcccctctcttcctctctcctatgtcatgcatgctgtctctttttctgtcttttcttagctcttcttcccctctccaccccttctcttcccttgtattagttccctgttgctgctgtaatatattaccacgaactcagtggctccaaacaacacaaactcactgtcttaccgttctggaggtcagaaatttgaaatgaggccaggcattgtggctcacgcctataaacctagcactttgggaggccaaggcaggaggatggcttgaggccaggagttccggatcagcctggacagcatagtgagacctcatcttaaagaaagaaaaagaaattagaaatgagttttacaggccaaattaaggctgtgttccttctggaggctccaggaaagaatctgtttccctgccttttccagctgctagagctgggcccacctgcatccatctccctatctcaagactaacgttaggcaggccgggcgaggtggctaacacctgtaatctcagcacttcgggaggctaaagcaggaagattgagcctgggagttcaagaccagactgggcaacatagtgagacccccatctctacaaaaaaaatgcaaaaagtagccaggcagggcacacacctgtagtcccagctactcaggaggctgagtcaggaggattgcttgagcctgggaggtcaagtctgtggtgagccatgattgaaccactgcactctagtctgcgtgacagagcgagagcctgcctcaaaaaacaaacaacaaaacaaacaaaaaacttctaatgtcatcatatctgcaaagtccctttagccacgtaagagaccatatctacagattccgggaattaggatgtggacatctttgggggtcattattcaacccaccacactcctcttgttctgtttcttactccttttctctcggttacaatccttctcgacatcttgctggctttgttcctgtgtcctctgctgctacttccctctgcctaccctctctctcacccagtagcatcctgaccagaccccactccgccccacccccaggattgcagaagtggctggctatagtcccgatgacctgatcggctgttccgcctacgagtacatccacgcgctggactccgatgcggtcagcaagagcatccacacctgtatgtatcccatttccccaggtgcgaagccagctgccacatggcccccagctgacaccaggaccccccagctccccataccccaggatgcactgcctccccacctcaacaccagctccctgctccccaagccccaaggaactgtctccttccttgccccctcatacccagtccccagatatttctctccccatttgcccccttggtggccctgatccctcccgatccccctcctcagtgctgagcaagggccaggcagtaacagggcagtatcgcttcctggcccggagtggtggctacctgtggacccagacccaggccacagtggtgtcagggggacggggcccccagtcggagagtatcgtctgtgtccattttttaatcaggtaagcaggaggaggggctggggtggctgtgtgtgggcctgatctgcatgtgtggacaggtgtgtgtgtgtgtgtgtgtgtgtgcgtatgagcatgcatgtgtatcatgcataagtgtatgtgagggagtgtgcacgtgtacacatatgaggaatgtgtgtcaccatgtaaatgccggtgtgtgtgtctgcatggacacaggtatgtgtatgggtgtgtagactgttaatttttttttttttttttttttttttttttgcgtgaacctctgcttaagtggattgttaattcaaattagaaaggggtctttatttggcctggcatggtggctcatgcctgtaatcctagcactttgggaggctgaggtgggcggattgcctgagctcaggagttcgaaaccagcctgggcaacatgacgaaatgctgtttctactaataataccaaaaattagccgggtgtggtgacacatgcctgtaatcccaactactcgggaggctgaggcacgagaatcattagaacccaggtggtggaggctgcagtgagccgagattgcgtcagtgcactctggcctcggcaacagagcgagactctgtctcaaacaaacaaacaaacaaacaaacaaaaggactctatattcaagttaaaataagaagtgtaacagaatcatggggtcttttttgctttttaaattttgatgtggctcacacctgtaaatcccagaactttgggaggccaggggaggaggattgctagagcctgggggttcaagaccagcctgggcaaagtggttaggacccattctcaaaaaaaaaaaaaaaaaaaaacctgaaaacagaccaaaaaaaaaaaccacacacacgcaaagatagatggtttgcatatggtaaattctctttatggtacacagttctgtgaatttttgacacacgcatgcagttgtgtaaccactatcacaatccagctattgaccaattagtgtgattataatagtggttacacaattaccacgattttttttttttttttttgagacagagttttgccctcgtcactcaggctggattgcactggcacgatctcggctcacttcaacctctgcctcccaggttcaagcgattctcctgcttcagcctcccgactagctgggattacacgcaacaacacgcccagctaatttttatatttttaatagagaaggagtttcaccaggttggccggtctggtctcgaactcctgacctcaggtgatccacccccctcagcctcccaaagtgttgggattacaggcatgagccactgcacccggcccatgttgtggtttatatcagtagttcctttgtaaatagtgaacagtattccatggtatgaatagagcacaggttttttttttatccattcaccagttagaagacattgggctgtttccaagtttgggtgattacaaaaaaacagctactgtaaacattctcatacaagattttatgagatcacatgttttcatttctcttgggtaaacagctaggattggaatggatgggttatatagtaagtgtatatttaatctaagaaactgccatggctgggcacagtggctcacgcctgtaatcccagcactttgggaagccaaggaaggaggatgactagagcctctgaggtgaagaccagcctgggcaaagtggttaagactcaaccgcaaaaaaagaaaaacagaaaacctgaaaacaaaccaaaaaaaaaaaacaaacacaaaaatatatatggttttcatgcagtaaattctgtttatggtacacagttctgtgaattttgacacatgcatgcaattgtgtaaccactatcacaatccagctattgaccaattagtgtggttacacaattaccacaatttatttatttttatttttatttatttattttttttgagacagagttttgcccttgtcactcaggctggagtgcactggcacgatctcggctcacttcaacttccgcctcccgggttcaagcaattcttctgcttcagcctcctgagtagctgggattacagctgggattacaccaagcccagctaatttttgtatttttagtagagtcggggtttcaccatgttggccaggctggtctcgaactcctgacctcaggtgatccacccgcctcagcctcccaaagtgctgggattataggcatgagccaccacacccggccattaccacgattttttacacaaaaatattctcttgtagtaaacccctcccacactcccatgtccctggcaaccactgtcctcagaccccagagttttgctttttccagagggtcacatacagggaatcctacagtatgtagccttttgggcctggctcttacttagcttgatatatttaaaattcctccatgttgtggtttttctttcttggtttttttgttttgtttttgagacagagtctcattctgttgcccaggagtgcactggtgcaatctcggctcactacagcctccgcctctgaggttcaagtgattctcctgcctcagcctcctgagtggctgggattataggcgcgcaccaacacgcccagctaatttttatatttttaatagagaaggagtttcaccagattggccaggctggtctcgaactcctgacctcaggtgatcctcctgcctcagcctcccaaagtgctggaattacaggcgtgagccaccgcgcccagcccatgttgtggtttatatcagtagttcctttgtaaatagtgaacagtattccatggtatgaatagagcacagtttttttatccattcaccagttggaagacgctgggctgtttccaagtttgggtgattagaaaaaaacagctactgtaaacattctcatacaagattttatgagatcacatgttttcatttctcttgggtaaacagctaggattggaatggataggttatatagtaactgtatatttaatctaagaaactgccatggctgggcacagtggctgatgcctgtaatcccagcactttgggaggccgaggagggcagatcagttgaggccaggagtttgagaccagcctggccaacatggcgaaacaccgtctccactgaaaatacaaaaattagccaggtgtggtagcacatgcttgtgaccccagctgcttgggaggccgagacatgagaatcacttgaacccaggaggtggaggttgcagtgagctgagatcacaccgctgcactctagcctgggtgacagagtgagattctgtctcaaaaaattaaaaaaaagaaagaaagaaacagccaggacagggtgcggtggctcatgcctgtaatcccagcactttgggagtccaaggtgggtggatcacctgaggtcaggagttctggaccagcctggtcaacatggtgaaactccatctctactaaaaatacaaaaattagcttggtgtggtggtgcatgcctgtagtgccagctactcaggaggctgaggcaggagaatcacttgaacctgggaggcagaggttgcagtgagctgagatcaggccactgcactccagcctgggcgacagaaggagacaccatttccaaaaaaagaaaaacagaaacagccaaactcttttccaaagtggctgtatcattttgcattcccatcagtaacgtatgggggttccagttgctccacatctgtgccagcatttcgcattgtctgggtgtttgggtttggtgttacttttagtcattctaatagatgtgcagtgggaaaatcacgatggggctttttttttccatcatgtgtcatagaagcttttcaccatttagaaatgcagaggtatccatgacaacattatgaggcagagttagaattacagcttttcggtcgtgcgcagtggctcatgcctataatcccagcactttgggaggctgaggtgggcagatgacttgaggtcaggagttcaagaccaggctgaccaacatggtgaaaccccgtctttactaaaaatacaaaaattagccagatgtggtggcgtgtgcctataatctgagctacttgggaggctgaggcaggagaatcacttgaaccccggaggcagaggttgcaatgagtggagatcagaccactgcactccagcctgggcgacagagtgagactccatctcaaaaaaaaaaaaaaagaaaaaagaattataccttttctttgaagaaggttatcttataggacatgcaccagttttctaaagccttaggggtttttctagatctggaggaatgttctgaaatacaaatcaacatatacatatgtatataaattttttttgaaataaagtcttgctttgtcatgcaggctggagagccgtggcacaaacagggctcgctgcagccctgacccacctgagcctcccaagtagctgggactataggtgcgcactaccatgcctaatttttttttgtattttttgtagagatggagtttcatcatgttgcccaggctggtcttaaactcctgagttcaagcgacccacccgcctcggcttcccaaaatgctgggattacaggtgtgagccctggtacccagcctataattttttaaaaatagggatggggtctcactgtgttgcccaggctggtctcaaactcttgggctcaagtgaccctcccgcctcagcctcccaaagtgctgggattgcagatgtgaaccaccatgccaggcctacaaatcaacttatgcctcatgtctctacccttctcagagcccttctgaagctccccagtatcctcaggagaaaagccaagggcgttggtgtggttcaccaggccctgtgaagctcctgcctccctccccttctcacttaccctccaaatctcagggcctttgcacaggcagttcctccttcccagaatgctctcttctcttccctcctctcctttctcctgagtcatgcccgctcatccttccagtctcagctcagacatcacttctggagaccctctttcctgagcccctacatgagctcaggtgtcccccatgcccattttctctcctggtgtcctgtacttttgcaccagagcacttaaaaccatttgtaattatcctattaacttgtgtgttcagccaggccttcttcgatcgtccttttcaaaattgcaaactcccatcactgctttattttctctgtagtacttaccactatcttttttttttcttctttttttgagacagagtctcattctgttgcccagactggagtgcggtggcacaacctcagctcactgcaatcttagcctcccgggttcaagtgattctcctgtctcaaccttccaagtagggattacaagcacccgccaccacacctggctaatttttgtatttttagtagagatggggtttcactatgttggccgggctggtcttgaactcctgagctcaagtgatccacccacctcagcctcccaaagtgctgggattacaggcgtgagccactgtgcctggccctccctagtattaccactatctaacccaacgttgtccaataaaagcatgatgccagccacatatgtcatttggaattttttttttttttctttgagacagagccttgctctgccacccaggctggaaccacattaaaaaggtaaacggaatgctgggcatggtaactcacacctgtaatcccaacgctttgggaggccaaggccaggagtttgagaatagtcttggcaacatagggagaccccatctttacaaataatttaaaaattaacccagcgtggtggcatatggctgtaatcccagctactcaggaggctgaagcaggaggatcactgagcctgggagattgaggctgcagtgagccgagatcgcaccactgcactccagcctgagcgagagagtgagatcctgtctcaaaaaaaaaaaaaaaaaaaaaagtaaacagaagcaggtgaaattaattttattttttaaatttcattttatttatttatttatttattttgagacagagcctcactctgtcacccaggctggagtgcagtggcgtgatctcggctcactgcagcttccacctctggggttcaagtgattctcctgcctcaacctcctgagtagctgggactacaggcgcatgccaccacactcagctaatttttgtatttttaatagagatggggtttcaccatgtgggccaggctgatcttgaactcctgacctcaggtgatccacctgctttggcctcccaaagtgctgagattacaggtgtgagccaccgcgcctggcctaattttaacaatacattttattttcatattcaagatcacaccactgtgtaagtagcggagctgggatttgaacccaggccactgactacagagtccttgctgtgaaccactacacagcagtgcttgatgaggatatatttgtggaatgatgaatgagttaactgaatgtgtcacacgtgcacatattcgagcccaagtgtatggagcatgtgagcatatgtgtccctatatgcactcaggtgtatgtgagcgctcctgtttgtgcctgtgtgtaccgagtgtgtatacaagttcgattgtgtgtgcttgtatctttcaggggaataagggtggctttgatccagcctaaattgggatgtttccagcccagggagggtttattgagtgtggggagaggtcatagcttctcaaggagctggtgggaagaccaggcccacctgcctcctgtcctgaagggggttatgcagatgagatacaaatgagggcctgatcctcagccccacccaactctccaaaagccaacttgcacagcgagcatttagattgtctctgcagccagagactgtgtgaagggaggtgccagggacataaggatgtatttctaaacctgttcccttgagtatgaaaaacatctatgaatagaaacagcataaataaaatcttattcataaaaattacagccctatgaattcttcctatttggtcatgtaatgaagactatgttaaaaatatattttttcatcaatacctttctaagaatatgtttataagtaaaaatctataaagagaatatttagttattctgaagcctttcgctcaccccgctctttgcccctgggcctcctctctctgttcctaggtctcctcccgcttctgtctttcagtgccgccccacccccttccctcagtcttcctcctctctgcccaggctgtgctaaatgccagctcttttttctgcctttccttttacagaaggagcttgggaagggacaaacttaactttcttttaaaaatggtgtcagaataggccgggcacagtggctcacgcctgtaatcatagcactttgggaggctgaggcaggtggatcacctgaggtcaggagttcgagaccagcctggccaacgtggtgaaaccccgtctctactaaaaatacaaaaattagctgggtatgggggcttgcacctgtaatcccagctactcggaaggctgaggcaggagaatcgcttgaacctgggaggcggaggttgcagtgagccgagatcgcgccactgcactccagcctgggcgacagagtgagaccttgtcttaaaaaaataaaatgctgtcagaataaaaagcagtcaacagaaatgaaacccttataggagacaaataaatgtgggcaattattttctgcaaaatgccctccaagcccctgggcgccattgccttctgtaataggacatcacctgaacaggctttctgggctggagccaaggaccctccctgactcccacctccctttctgccttgtaccccagccaggtggaagagaccggagtggtgctgtccctggagcaaacggagcaacactctcgcagacccattcagcggggcgccccctctcagaaggacacccctaaccctggggacagccttggtatggggcagggctggggccgggaggggttgtgtccccagggcccttgggagaaagcccaagcaccttaacatggctcaccaggccctgtgggacctgcctcctgcctcccttccctgcgcactcagcctccaaaacacacagcctcctaagagcccttggaacactccagcctcgtgcctcagggcctttgcacatgcagtttcctagaatgctcttctctctcctgtcctccctccccttctgtggctatggggtggttgcttcagtctcttgctggcctctgctctaaatcctgctgtggctccacattgcccccacgcttctgcctcttccctgttctggctttgctgctctttggcttccagtaatctcgatcctcctaagtctggctcctttctccctcttccttcactctcctgccatcctggatgagcctccctcccagtctatccttcaagacctcaccttctccaagctgttgctggccacccatgctcctgggtgtggggtgggattgctgatataatatcctttccttttctggctcagagctggctctgggccttgtcttaacctctggggaccttacagcctccttgagggcttggggccagtcttttctcctaaggtgaaagctccccagagctgaatggccaaatgctgttctgagccaccaatcccttcccctcggacctttcagagcctcaccacaatctggccactgaagttcacacctgggctgggagcagtggtttatgcctgcaatcccagcactttgggaggccgaggtgggcggatcacttgaggtcaggagtttgagatcagcctggccaacatggtgaaaccctgtctctataaaaaatacaaaacttagctgggtgtgatggcgggcacctgtaatcccagctactctggagactgaggcaggagaattgctcgaacccaggaggcagaggctgcagtgaactgagatagtgccactgcactccattctgggcaacagagctagactccatctcaaaaataaaaataaagttcacacctggcccagcaggggtcctccaggccccttccttaccctctcactaagaacagtggccatcctgacctgctgaagatgtcaactgtgttcctggggttggtatggagggctctggcccttggccctcagtcaccagcccgtgtcctccccatctccatgtgtcctgcagacacccctggcccccggatccttgccttcctgcacccgccttccctgagcgaggctgccctggccgctgacccccgccgtttctgcagccctgacctccgtcgcctcctgggacccatcctggatggggcttcagtagcagccactcccagcaccccgctggccacacggcacccccaaagtcctctttcggtaagccatcccacccatgtgagccctcagcatccagtgctcagtccctcagggggtcttggcctgtgacttaaacctgactgttctctgggcctcagcttctccatctgtgtagtggggaggttgggatgagatggggttgaggttcctttaagacgcagatccagatttttcaattgttagaattccagagtctggctctgtttagggaaaaactctctcaagctatgtttttcctctgctctcctaataatgcaacaatcgtcaacacagaagaagacttctgtgaccaaatgtgggcagtttttcccacacaccaagcagcggacaccagctgggtgtcctccaattcaattccggcatcatctacctggagatagtgtcagatttcacaggttgggcctcagtccccaagactgctctttgctcttcagacaccagtcacaagtctgggcctccagaatttcttttttatttttatttttattttcgagatggagtctcactctgtcacccaggctggaatgcagtggcgcaatctcggctcactgcaacctccacctccgaggttcaagcaattctcttgcctcagcctcccaagtagctgagattacaggtgcatgccaccacacctggttaattttttgtatttttagtagaggcagggtttcaccatgttggccaggctggtctcgagctcctgacatcaagtgatcttccggcctcggcctcccagagtgctgggattacaggtgtgagccaccgtacctggctctttgggtttgattaatttgctggagcggctcacagtaatcaggacaacacttatttaggtttactggttcattgtcaaggatattgcacggatacggatgaagggatacattgagtgaggtatggaggaatgtagggtttcggagcttccatgccgtcccgggcaccaccctccagaaacctccatgggtcagctatctggaagcccctccaacccagtcctcttgggtttttatggaagcttcatgacatcagcattccttcccccagggtatcgggcaggaccctctctggggacagtggttttttttttgttgttttttttttgagacggagttttgctcttatcgcccaggctggagtgcaatggcatgatctcagctcaccacaacctgcgcctcctggattcaagcaatgctcctgcctcagcctcccaagtagctgagattacaggcgcacactaccacgcccagttaatttttttatttttagtagagacggggtttcaccatgtttgtcaggctggtctcgaactcctgacctcatgatccacccgcctcggcctcccaaagtgctaggattacaggcatgagccaccgcgcccggcctctggggacagtcttatgacccacaatcaaaaaggcaggggaagattagagacctgcctttgggcaggtgaaacgagggcagaagaaggctggagaggttctgtttcctgaggcctaacacacccagtgttctaacaaaagactgttagaactgttttactagactgttctaataaaagactgttctaacaaaagacaacggccatgggagtttgacccaggaaccatgcacaaaatcatatatatatatgtgtgtataaaataacaccacaggccctgtattagtctgtcttcacgctgctgctaaagacatacccaagtctgggtaatttataaagaaaaaaagatttaatggactcacggttccacatggctggggaggcctcacaatcatggcggaaggtgaaagatatgtcttacatggcggcaggcaagagagaacgaaaaccaagcgaaaggggtttccccttataaaaccatcagctctcatgagacttattcactatcacgaggacagtatgggagagaccacccccatgattcaattatcgctgaccaggtccctcccacagtgtgtgggaattatgggactatagttcaagatgagatttgggtggggacgcagccaaaccctatcaggcccctaacctgggatgtttggaactggcacagatgaccctcctcccactccagcttgtgactaagcatccagttctctgaactttgacctcaaagagtcaaagtgtctaatatcctgatttatacagacctggattaaatcctaaatctgccatttatcagccacgttaccctggctgggcaagcaagttcttgaggccttaatttcttcacctataaaagaaagataataacatgtcaccacatcattggttattctgagcattaagtgacagtattcatgagaagcactcagtaggggcctggcacctatcggtgctcaacagatcataccagttactatcaatatttgttgtgaagatagtctgacctttgacctcagtgggtccacgttatccagtgttgactgtcttcatccccactctccaccccaagaaaatatcctctctccagagaaatacagactgtgacctttgacctcatcctttacccctgagacagctgaactctccattgtttccccactaaactccaggctccaagacctttaaccccagaggatttgtttgaaagtcttggcctcaggctgggtgcggtggctcatgcctgtactctcagtactttgggaggctgaggtggggagattatctgaggtcaggagttcaagaccagcctgactaacatggtgaaaccctgtcactactaaaaatacagaaattagccaggcgtggtggagggcgcctgtaatcccagctacttgggaggctgaggcaggagaatcacttgaatccaggaggtggaggttgcagtgagctgagaccacgccattgcactccaacctgggtgacagagtaagactccctttcaaaaaaaaagtcttggcctcaagctcatgtttttatttatatatatatatatatacacacacacatatatatatacacatatatatatacatatatatatatatacacatacacacacacacacacatatattgtgtgtgtgtgtgtgtgtgtgtgtgtgtgagacagagtcttactctgtcacccaggctggagtgcggtggcatgatcatagctcactgcagcctctgcttcccaggctcaagccattctcctgcctcagcctccctagtagctaggaccacagatgtgtgccaccacacccagctaatttttgtacttttagtagagacagggtttcaccctgttggccaagctggtctcgaattcctgacctcaagtgatccacccaccttggcctcccaaagtcctgggattacaggtgtgagccactgagcccagccaggctctgatccttctaactggaacttccatgtttgccccatccatctatgtacacccaggcattctgagttttgaacacccaggttcaaaactcatctgcatttgccgttggaccccctttgtgccccagatgcctggcatttgatccccacttctacccttgagctgcagactgtcttaatgttgatacctcccaggctcaagatttcctgaagtttctactccatctctccacaggctgatctcccagatgaactacctgtgggcaccgagaatgtgcacagactcttcacctccgggaaagacactgaggcagtggagacagatttagatatagctcaggtaagggctggcatggaagggagtaatcctcagccctgtgttctggggattcacatatgtggctttagagaagggtagtgggatggttaaaggaatgaatggatggatggatggaccattgtattcattaggtggatgatggtggatgaatggatgaggtttaggcagatattttaatggatggatagatgggtgggtaggtggatgaatgtttggatggatattttgatagctggatgaaaaatggataggtgatacttggatggatgatttattgaatgcatagataaaatgacagcagcatgatgtattagttatctactgttgtgtaacaaattgcctaaaaacttaacaccttaaaacaacaactatttattatgtcacatggtgactgaatatcagaaattcaggagcaccttatctgctggtttttgctgagtctctcatgaggttgaagtcaaactctcagtcagggctacagtcatctggggttagagggttttcttccaagctcacacacatgaggttgttggcaggcctcaatccctcactttgctttggctggaggcctcagttcctcatcacgtgaacctctacatagactccctaagtgtcctcacaacatggcagttggcttccctaaggcaaacaatccaacaaagagaaaaagggacaaatggagaagtagagagatagaaagtacaagtcccagactgaagacacagtctttcatggcctaatctcagaagtgacaaatcatcgcttctgccatattgttttggtcatatagatcaatcctgtacactgtgggaggcaataacataagagtgtgaacatcaagaggcagggatcattgggaacttccaatgattgatgtctctccctcatgcaaaatacactcacccacctctcaaggccccccaaagtctcccaaagtttcttccccttacagcatcagcttgaagtccagaatctgatcatctgaatctggtcttggtgctggggaagctccttgagtacagttcctctcaacattttggcttgtggactaatggggacaagtcatctgtcacccacatactcaatatacagtggtgagacaggaatagacactactattcaaaaaggaggggtaagaggggcatgcatatatccctggtccatagcagttttgaaatccatatgggaaaatatcacaagttctttcattaggactttaaaaaaaaactgggggccaggcgtggtggctcacgcctgtaatcccagctctttgggaggccgaggcaggtggatcttgaggtcaggagatcaagaccgttctggccaacatggtgaaaccctgtctctactaaaaataaaaataaaattagctaggtgtggtggcacatgcctgtaatcccagctactcgggaggctgaggccagagaatcacttgaaccagggaggcagaggttgcagtgagccgagattgtgccactgcactccagcctgatgacagagctagacttttgtcccaaaaaaaatatatatatatataaaaatagagacagggtctcagcccaggctggtcttgaactcccaggctcaacctcccaaagtgctgggattagaggtgtgagccactgtgcctggcccaagggtgctcttcattgctctgagaccactttttttttcttttttctttttttttttttgaaatggagcctcactctatcacccaagctggaattcagtgacgcaatcttggctcactgcaacttccaactcccaggttcaagtgattctctggcgtcagcctcctgagtagctgggactacaggtgcccactaccatgcccagccaatttttcgtatttttagtagagatgtggtttcaccaggctggctcagagaccacttattaatgttagcatcatttgccatctggagggctcctgcagtcagccaaactcaaggttaatggcatggttctccagactgccaagtctgcccaagacttctgacatcagacacaagtttgagggtccccagggtcacccttactttagaccagctgcctaccaatgtggagattcccagactcctgtagactccctcaagtttgataatttgctagaagtgttcatggtactcagaaagtgctatacttaagattgtagttttattataatgaaagaatacagatcagaaacagacaaaggaagatattcataggtggaatctgggactggagggtcccagatggaaagttttcttctcctcagggacatgttgtcctcccagtattgacatgtagcaatatgtggagagtaatgccaactcaggaagctcaccaaagcatcagtgttcagagtttttattggggtttcattgcataggcatgattgagcaaattaccgcccatgtaattgaattcagtctccaatgctacctctaccttccctggatccggctgattttgtgcgggccaaagccccaaccctctaatcacaatggtggttctttctgcatggccagcctccatcctgagttatctcattagcaaaaactatctaggggctcaccatgagtcacctggttagcataaactatccaaaggacccacagtgaatagtaaagacactgctatcactcagaacattccagaggtttagaggttaacttccaggagctgggacaaaagccagacctctctttgggtaaagttaattattcactacacaaggaggttgagaatcttcaaaaccttcaagtactatctccttcatgtttaacatttcttcctttaggagaaatatttttttatctctctctcttcttgccttttactataagtaacaagatgaaatcaggcagccccttcaacactctggctgggaatcttagctggatcacctcgtgtatttgttatattttctactttccacataactgcaggcaacagtgttgctaaactttcagccactacaggacaaaaattctctttcctctggtttccagtgatatgtttctcacttctctctaagccctcactgagtcttctcaatgttcagattttgaccaatggtttctttgaggcatttaggtttgtttttttttttgagacagtatttcactctgtcactcaggctggactgcgatggtgtgatcatgctcactgcaacctcaaactcctgggctgaaacaatcctcccacctcagcctcctgagtaattagaactacaggcatgggccaccatacctggctaatttttttccttttttgtgtaggtgggggtctcactatgttacccagactggtctctaatttctagcctcaagtgatgctcccgactcagcctcctaaaagctctgggattacaggtgtgagctaccatgcttctgacccagtttaggatttctctaacatgttcttcagggagtccttatacccattttacagatgaggaaactgaagctcagactgttgaccacaggcacagaactcagaagtgatggtgctgggacttcagccaaggtccacccaagtccaaggctcatcctcttacctccctcctgccctccgcaggatgctgatgctctggatttggagatgctggccccctacatctccatggatgatgacttccagctcaacgccagcgagcagctacccagggcctaccacagacctctgggggctgtcccccggccccgtgctcggagcttccatggcctgtcacctccagcccttgagccctccctgctaccccgctgggggagtgacccccggctgagctgctccagcccttccagaggggacccctcagcatcctctcccatggctggggctcggaagaggtgagccacagtaaaggggggacatcaaggcagcatcccctcaccccgtcttgcccctgcctcctgcttcagcctcatccctcaccatttctctaaccctgatctctgctccagccaggccctcggtgggcccagcacatgccaagtttgtgccaatctctgtgcctttgcctaggctgtacaccccttctggagtgccctccactgctctcactgtttatccaaatcccacctgtcaaccagggctctctcctttggaacatagttatatctgatctggtgacaatttttgtcagagtttagaagacattgccgtgtgtcagagaaactatctaagccgggtgtggtggtgcatgcctgtagtcctagctacttgggaggctgaggtgggaggatctcttgagcccaggagatcgaggctgcagcgagctgtgcttgtgccactgcactccagcctgggcaatggtgagaccctgtcaagaaaaaaaaaaaaaaaaagatagagagagagagagagagtgaagagagaggaaggaagggaggaaggaaagaagaaggaaggaagggaaggagggagggagggagggaaggaatggaaaaaagaaaagaaactgtctagaactaaattgcaagcatgtgctcatttcgaatccagagtggtcttatccttatggatacatcttggtatctcccaaggctcccagcttggtactggctataaagtgggcctgataaatacttattaaatgagggagggagggaattattaatgaatatagttggcactttaatgggtggacaggtggatggatgcataggtcgatggaaggacagatggatggatgtgtaggtgaaagggtgtatgtatgtatgtgtgtatgtctggacggatggatggatgaatgatggatgtctgggtagacagaaggattgatggatgggtcaatggattgatgggtggctgaaaggaaggatagatggtggatggatggatgaatcggatggatggagggatggatggatggatggatggatggatagttggatggatggtggatggatggcagatggatggtggatggatggtggatggatgggtggttggattaatcaatggattaatggatggatgcatggatggtggatggatggatggatggatggtggatggttggcagatgtatggtggatggatggcagatggatggatggatgaatcaatggattaatggatggatggatggtggatggcagatggatggcagatgggatggcagatggatggatgggtggatcagtggatggatggatggatggatggatggatggtggatggctggcagacagatggtggatggatggcagatggatggatggatggatggatgggtggtggatggctgggtggaaggatggatggatagatgaaggacaactaggtggataaataggtggatgaatggaaggataaatggatggaggttgggtgggtgggtgatggatcattggatgaatgagaagatggattggtggatggatggatggactggtgggtgtatgactaaaggaataaataggtgctcaggggagtgaatgaatgctcatcacctgcttacactgttatccacacttgcccaggtttgctgtgtcctgagattcttgcctgttttcctccaggaccctggcccagagctcagaggacgaggacgagggagtggagctgctgggagtgagacctcccaaaaggtcccccagcccagaacacgaaaactttctgctctttcctctcagcctggtgtgttgggggattaatgggattctctggccctcattacctagctggcttaaacctactgttttatagataggaaaccagagaggggcaggggctggttgagggtcatacagaaagtcagtgggccagctgagactaaagcctgatcttctagtttcactaatgggtattaaaaacctctgcagtgaactgagattgcgccactgcaccccagcatgagcgacagaatgggaccttgtcaaaaaaaaaaaaaaaaaaaaaaaaaaaactctgcaaatacatgtaagatggcagtaagtcagctgggcgcggttgctcacgcatgtgatcccaacactttgggaggccgaggcaggtggatcacctgaggtcgggagtttgagaccagcctggccaacatggagataccccgtctctactaaaaatacaaaattagccgggcatggtggcgcatgcctgtaatcccagctactcaggaggctgaggcagaagaattgtttgaacccaggaacagaagattgcagtgagctgagatcgtgccactgcagtccagtctaggcaacaagagtgaaactccgtctcaaaaaaaaaaaaaaaaaaaggcaataagtgcaaagaaggaaaaattaagcaggctaaggggagaaatggcatgtggctggtatctgcagggatcttctctgctcccatgggaccccctccccaaactagaacaggtcttggccttggattactagtgcagagttcaaagtgcagacactagaatcagactgacctgggttcaagtcccaggtctgccacccagtaactgccacctgaccttgggcaggttacgtcaccacgtggagcctcagttgcctcatccagaaagtgggaatagttacatctcacgggactgccatgaggattaaaggaaattaggcccttagctgacactcagtgggctgaccataaatggtgtacaaaaacaaaccaaagggccgggcgctgtggctcacgcctatattcctagcactttgggaggccgaggtgggtggatcacctgaggtcaggagttcgagaccagcctgggcaacatagtaagatgctgtctgtacaaaaaaaaaaaaattaaaatttaagcgggtgtggtggcatgtgcctgtagtcccagctacttaggaggctgcggtgaaagcatcacccgagcctgggaggtcaaggctgtagtgagccatgatcgtgccactgcactccggcctagatgacagcacaagacgctgtctcaaaaaaataaaaataaaaaagccagcctggactatgtcacttctgcaaggcctccctctaggacctttcatggccctctagtgcttacagcagtgccctggttcttcactctgcaaagggttgtttgaatatgagatgtggttgataatataacagtttacaggccagacataatgcctcacgcctgtaatcccagcactttgggaggatgaggcgggataatcacttgaagtctggagttcaagtccagcctggccaacatggtgaaaccctgtctctactaaaaatacaaacgttagccgggtgtaggtgcacacctatagtgccagctactcggaaggctaaggcacaagaattgcttgaactctggaggcagaggttgcagtgagccgagatcgcgccattgcactcctgcctggaggacagggtgaaactccctctcagaaaaaaaaaaaaaacaacctctctctatatatatatatgtatatatgtgtgtatatatatgtatatatgtgtatatacatatataacagcttacacttattaagtgcctaccatgtgccagacactaactgcactaaattccttgcatgattaacttatttaatccccacaactactattgaaatgttcttgttactgttatacacacttacacagaagaagttaaacaactgtatcagagtctgcacaggaaaggcagcacactcagagggagtgttgaggagaatttaataacaggactgttgaaaaaggtgttaacatagtgtagggaaatcagcaagcctggtgcagtaccttggggcacagcatgggaagtgggcatcagccctggcctgaaggtgcagggcggggtggtcactggatcctgcagcgagtggagtccagctaatgagggctgaaaccttccatggagggacaccgccaactcacagagaagaataaataccctacctgctggtgtctcccatgagctaaccaacaggatcacacggagcaaagttgcatgctgtcacggtctctgtgtacaggtcctcgggcgaaggaagaaggagaagggggatgaggccctggaggaacacaagtaggatgactggacagggactgacccaaagtcacaccacaaatgggtggccactggacctcagcatcccttaactactgcaccatcttgtctttggatatatatttttttccttcctttctttttcttttcttttcttttcctttcctttcttttctttctttcttttttttttttttttttttttgagacagagtctcactctgtcgcccaggctggagtgcagtggcgcgatctcggctcactgcaaactccatctcccgggttcacgccattctcctgcctcagcctcccaagtagctgggaccacaggcagctgccaccacgcctggttattttttttgtatttttagtagagacagggtttcaccgtgttatccaggatggtctcaatctcctgacctcgtgatccgcccaactcggcctcccaaagtgctgggattacaggcgtgagccaccgcgcccggcctcttttctttcttttttgagatggagtctcactctgtctaccaggctagagtgcagtggcacgatcttggctcactacaacctcctcctcccaggttgaagcaattctcctacctccgcctcccaagtagctgggattacagacatgcgcaaccacaccctgctaatttttgtatttttagtagagatggagtttcaccatgttggccaggctggtctcgaactcctgacctcgaatgatccacccatctcagcctcccaaagtgctgggattacaggcgtgagccgccatgcccagcttatttcattttttaaatttttttgtagagatagggtctcattatgttgcccaggctgatctcaaactcctgacctcaggtgatcctcctaccttggccttccaaaagcactagaattacaggcatgagccactgcacttgcccttatttttattttacttttatttttatttttattagagataggatctctgtcacccagactggaatgcagtgacacgatcatagctcactgcaacctcagcctcctggtctcaagggatcctctcacctcagcctcctaagtaactaagattacaggcacatgccatcacacccagctaatttttaaatttttgtagagatgagatctcactatcttgcccaggctggtctcaaacgtttgggcttaagtgatcctcccaatcctctggcctcagcccccgaaagtgctgggattacagtcaccactcccggctgttccttggatactaatgatgatgatgatggtggtggctttgtctctctcccacagagtttccttctgacaggaggaccagccccagggagcctgcaggaccccagcaccccactcctgaacctgaatgagcccctgggtgagtagcaacctgggtatccagagccccagagcaccttctcccccgggaggtgcgagagggatggagccattccaaaggtgctgggggactgtcagtgcttggaggtgaccttggtggaaacggcagctcctgtctcttctctcttctcatgggcactgtggaggagagagcccctaagggaggcaggggctctccaaggctgccttttggggtggaagcccgagcctaggtctctggagcctgcacgcctatgatcacatttatttatttatttatttatttatttatttattttttgagatgaagtctcactcttgtcgcccaggctggagtgcagtggcatgatctcggctcactgcaacctccgcctcccaggttcaagtggttctcctgcctcagcctcccaagtagctgggatcacaggtgtgtgccaccacacctggctaatttttgtatttttagtagagatgaggtttcgccatgttggccaggctggtctcgaactcctgacctcaggtgatctgcctgccttgacctctcaatgtgctggaattacaggtgtgagccactgcacccagcctaaaaatttttttttaattggctgggcatggtggtgcatgcctatagttccagctactctggaggctgaggtgggagggtcacttgagcctgggagttcaaggctgcagtgagctatgatggtgccactgcattccagtctgggcaacacagcgagaccctgtctcaaataaaaaagagtgcaagagggcagggtgagtgtttcctgcctgtaatcacagtgttttgggaggctatggaggggaggatcacttgagaccaggggttcgagaccagcctgggaaacatggcaaaaccccgtctctacaaaaaatttttaaaaacctggtgagtgtggtggcacgcacctgttgtcctagttacttgggaggctgagacgggaggattgcttaagcccaggagttcgaggctgcagtgagctgtgactgcaccactgtactccaacctgcgtgacagggcgagatcctgtctctatttatttattttcacatttttattttctttctctctctctctcttttttttttttttttttttttttttgagacagagtctcgctctgccacccaggctggagtgcagccgtgcgatcttggctcactgcaggctctgcccccaggttcacgccattctctggcctcagcctcccgagtaactgggactacaggcgcccgccacctcgcctggcaaattttttgtatttttagtagagacagggtttcaccatgttagccaggatggtctcaatctcctaacctcatgatccgcccacctcggcctcccagagtgctgggattacaggctttctcttttttttgagaagggtctcgctctgtcactcaggctggagtgcagtggtgcactgtcagctcactgcagcctctgtgtccccgggctcaagcgatcctcccacctcagcctcccaagtagctgggactgcaggtgggcaccagcacacttgactttgtgtgtttgtgtgcgtgtgtgtgtgtgtgtttagtagagacagaatttcaccacgttgcccaggctggtcttgaactcctgagctcaagcgatccactcatctcagtttcccaaagtgctgggattacaggcgtgagccaccgcaccaggcccctgtctctaaacaaacagtccaggtgcagtggctcatgcctggaatcctagcactttgggaggctgaggcaggcggaccacctgaggtgaggagttcaagaccagcctggccaacatggtgaaaccctgtctctactaaaaatacaaaaattagccaggcacactggcaggcgcctgtaatcccaactactcgggaggctgagacaggagaatcacttgagcccaggaggcagaggttgcagtgagctgagatcacgccattgtactgcagcctgggcaacacagcaagactctgtctcaaaaaatataaatataaatataaacaaatgaacaaaaaagagtgggagatgaaaataagtgtaacggggaaataatgcatgcaaggaaaaaggtttggagtagggggatttcagttttaaacagtatgatcagggtggtttcattgagaaggtgatagctgagcaaagacctggagtgagtcctgacgatatcggggggaagagtgtcccaggcagagagaacagcaagtgcaaaggcccttaggtggggactgtatctatcttttttggggtgtggggggacagggtgtgtcttgctctgttgcccaggctggagcacagtggtgcgatcacagctcactgcagccttgaactcctgggctcaagcgatcctcccatctcagtctcccaagtagctgggactacacttgtagctgggactacaagtgcgcttcattacgtctggctaattttttaatttctgtagagaaagaggtcttgctatgttgctcaggctggtctcaaactcctgggctcaagtgatcctcctgcctcagccttccaaagtgctgagattgtgcctggctgtctctgtcttctttggggaaaagcaaggccaatgtagctgaagcagagaggagagaaaggtgagggctgactgcatggagcctctgtggggcattgtgatggctttgaagtcaccttgcttgaggaggctgcctcagggcctttgcatatcctgatccttctgcctggcatacttttccctctgttctttgccatgttaccacatcctttagatctcaaaccaaatattactccttacacaaagccctgcctaacttcatacgctcatggtttataacactccataattacacaggcctttgtgtcataatttgatgactgtctgtcttctcctttgggtatgagaccttcaagggcaggggccagggctgtctgggtccctgctgttctcttctttgtgcacatgggtgggcggtggctaagcacagaggaagttctcagcacatatttgtgaatgaggagctaagattcacgcactcgcactgtgcctagctttgtgctaaatcctctatgcacctgatccaattggcgcttctcactggagtgtcggtcccataagggcagggagattcatccatcctggtcactgctgtgtctctagcacctggcacagtgcctgacacaaagtaggtgctcagtaaacatgttgggttttttgttgtttttgagataggttttcactttgtcacccagtctggagtgcagtggcacaaacacagctcaccgcagcctcgacctcctgggctcaagtgatcctcctacttcagctcccacaagtagctgggactgcagctatgtgccatcatgcctggctgatgtttatatgttttgtagagacgaggtttcaccatgttgcccaggctggtcttgaactcctgagttcaagcgatccacctgccttggcctcccaaagtgctgggattactggtatgaaccaccacgcccgacagtaaatatgttttgaatgaataaactctcataaatgaagtatgtgtgagtatcctggtttcccaagtaacaacagctgacttaactgctttctcaccagtactagttatggttcaaaacaccttccatggatttactcatttattcctcacaacagaggagtaaatcaagagggaggtgctgttattagcccgtcttacagatgagggaactgaggcacagagagatgaagccacctgccccaggtcacacagcaagtaaatagcaatgcctggattcaaactagggcagcatctgactctggactcgggttcttcaccgcagccctgaacaccccagagaggttcagagagcagaacgtgcccaagacgtcactgccgtttgaatccagacaggcttgcctcaccacccaggcttttaactgccaggaaggggagacgggttggtgtgggatatgatgaggtttctcttcaaataacccgatcaatcttttattctttaattgatagtaccccccacctttttcccttcttctcctcttttcctttttgcctttgttaaatgcccagacacgccacaataccaggcgttatcaataccagctcacattcctttccttatttaaaaaaaggactaactttctaactcatcacagacaccccttcccctttcctctctgctttcttttacgtgtccaccttatctaaaaaaaaatcaaatgtttagccaaccgaaattagtttaaattgtataacccgaccccagccaataaaaaaaaagtacaaaaacaagacttgcgtcaaaaataaaggctcttgtgcccctttgttccagtgtgctctcatggcaactagccaaagaggcacccctctgcgcaaaagtaaaattactaaaaatcctttgttcgagtgttcaatttccttaagattttaaacattattcctgacattggggttatggttgtcctgtgatttatctttcgtcttttacctttcatttatcatttatctttcatctttgcaggcctgggcccctcactgctctctccgtactcagacgaggacactacccagcccgggggccccttccagccaagggcaggctcagcccaggctgactgagccggctcctctccccatctgccttctcctcccccagaaaggacctcaaccacactccacgccggcagccaacgcacaggatgggggcgccaggagaggggcccctctctcctctatgtaccccctgcccacctcgggcctacctcagccctcacccctctgcctgctcccaatctgggggctctctggggtggtctcagctcagtgacctctgggaggtggtccctggccccctcctccttctctcaggatttctcttggggttctcaatacttggttacctcattatccctttctctgcctctcttggctttattttggggaatcaggggtgaggagggttgggggggtcatatctgtgtttccaggttctggggagaacaatgatccacgggtcaacgtgatcacatttccttctatccttcttgtattattatttttatttttgtcaatttcatgatatggtttttaatcatgatgaattgcctggggtctgtaagaatgtgggactctgatcttccccctcttcaggtgtcagtgcggagaggctctgggccagacctcacccccagtgacttccgattgaggccaaagaccccaagctgcccgccagctctgactgccccttgcgctctgggcttcctgccgcccccagctttgcctggacactgacttcattcatggtcctcctacttcaggggcagcctcccagttcctctgcttccaaactatgcaacctccaacctgctccagttccagactgtataacctctgacctgcactggttctagaccacacaacctccaatgtggtctgctttagatcaccttcttcttcttccttcttcctcttcctcttcctcctgctcctcttcctcttcttcttcttttttttttttgacagagtcttgctctgtcacccaggctggagtgcagtggcgcgatttcagcttactgcagcctccgcgccctgggttcaagtgattctcctgcctcaacttcccaaatagccgggactacgggcatgtgccacattgcccggctaatttttgtatttttagtagagatggggtttcaccacgttgtccagtctggtctcgaactcctgacctcaagtgctccacctgcctcagccttccaaagtgctgggattacaggcgtgagccactgcacccggctagaactcactttctccaaatccctctgcttcgaatttcaccgtcttcagctctttctagttctgggcctcaccagcctctcattctgcctgttttcaaaccttacgatccccaaaaattgtctggttctgggcctctaactccctctggctctatagtctatgactaccagattcttttggttctagaattcactaacttcctctggttctagacctcttcctataaattaatccctcttgttttagatctcacaccctccaacgccctccggttccagatcttatattcagtgatttcctctggttctggaccccacaactccaagcttcctattggttccagttctcctgatcggtaatacatttggttccaaatccagacctcttaatctctctctttttttttttttttttttgagacagagtcccactctgtcacccaggctggagtacagtggctcaatctcggctcactgcagcctccacctcctgggttcaagcaattcttgggcctcagcctcccaaatagctgggattacaggcatgtgccaccacgcccagctaagttttatatttttagtagagacagtgtttcaccatgttggccaggctggtcttgaactcccgacctcaactgatccacccgcctcagcctcccaaagtgctgaaattacaggagtgagcctggccagacttcttaatttctaaatcacttttgttttagaccttatgaggctcagcttattcttctgcagttctctataaccaagactcattttctctcatcaaaaacaagtacagagagtttgatgtgtttatctcttttttcttcctcttcttttttttttttttcttttttgagatggagtctctctctgttgcccaggctggagtataatggtgccatctaggctcactgcaacctccgcctcctgattcaagtgattctcctgcctcagcctcctaaattggtgggattacaggagcccaccaccacatccggctacctttgtgtattttttagtagagacggggttttgccaagttggaggggctggtcttgaactcttgacctcagatgatccacccgcctcagcctcccaaagtgctgggattacaggcataagccaccgtgcccgaccctgtccttatcttataataaccagttcttctagaaccagacgatgctctagttctcctagattctgaacctcatgacctgtaccactcactagttccagactacacaacttctagaaggtgccacctccagggtcctgattcaagatctggtgatctgctgtttctctggttctagaactgacttacaagtgccttctgattctagacctcattccgtaagttcccttggctctagacttcatcatttccagctcctcctcactcaagatctgactccaaattaccctgggtctagaattcagccttcaaatatcttctgattttagactttgccttatacatttctctggttttagatcttaccaccctcaactccttctgattctagatcttatggttcccaaatctctctggttctagaactcagattttaggcttttgtttttccttttttttgttaaaaaaaaaaaaatagagacggggtttcaccatgttgcccaggctggtcgcgaactactgagctcaagcaattctccctccttggcctcaccaaagtgctgggactacaggcatgagccactgagcccagccaggctttttctaattctatgctttattctataaattcctctgcttctaagcctcacagcttccaactgcctttgatttcagatccaaattcctctgattctataattcagcctccaaatgcttctgattctggaatctagacttttccctaaagattcctctggttctgaatcttataacctcaactccctaattccagaccccagcctcctaaatctattctgggcttcccaccccactgaacttacccaattccttctttcagtcttaagttttcccattctaaacccctaccctctaggctgtgctgctcctggacttcatgcctctccattctcattgcctacaatctctgtgccccagaaccccctccacttcccaccccagccctccagacatgcacttaccttgactttaccccacatgtttggggcacctggggctccctcaccccttgggtggtttgcaatctgaagacttctccagccacacaggcacatgcacaggcacggtgctgtctgcatattgccaggtggggagagaagccaggacccctcagctgtctgccaccatctatgtgcctcccttaccccccagctttctttctacagatggtgctactcttggtctcccacaggaaaaggcctccccccttcttagccccatttaccccgtttgtggaaggcactgctcgctctgttttgtcagagagtggcctatccagattggtgctatgggggggtctgacccctccctcctccctctggaggtgatgtgggccctcaatggagggaattgtgctgggctagggaaaggggagggactagactggccacactggctctgaaactcaccaatctctatacaccataaagacctcaccttggtaggcaccagagctctgcgtgttgactcatcttttggatctcctctgggagtgtgggtgcactggtggctgagtgtctttttttttttccttccttccttccttccttccttccttccttccttccttccttccgctctctctctttcttttctttttttttttttcttggagtctcactctgttgcccaggctggagtgcagtggcacaatctctgctcactgcaacctccactacccaggttcaagcgattctcctgcctccgtctcccaagtagctgggatttcaggcatgtgccaccacacccagctaatttttgtgtttttaatagagatggggtttcaccacattggtcaggctggtctcgaactcctgaactcaggtaatctgcccgcctcggcctcccaaagtgctgggattgcaggcatgagccaccatgccaggccctttctttctttcgagacagggtctcactatctcacccaagctggagtgcagtggtgtgatcacggctcactgcagcctcctgggctcaagcaatcctcccatctcacccttcccggtagctgggactacaggtgcatgacacgaggcccagctaattattttcatttttttgtagagacagagccttaccatgttgcccaggctggtctcaaactcctgggtttaagcgatcctcctgcctcagcctcccaaagttctaggattataggcttgagccactgcaccagccccatgttactttctgattctgtgtatctgtatgtgtgtgtgtgtgtgcatgcacacgagtgtgtgcacagtgtcattctgtgtatgtgtatgggtctttgtcacattctgtgaacctgtgttgcagcaggtgggtggggttgtgattccttctacaagtgcatattagtatctgggtgaagtgattctgccttatgtgtgtttctggttattttgggtttctgtgtttctgagtgtggaaggtgctgtgattttttttttttttttttgcctatgtatgtctgtatgatgtgattctgtgtacatgtgtgggactgcttgatgctataattctgggtaccaatgtgtgtgtgacatgattgcccatagttaagtgagcatgtgtgtgcaagagtgtgtgtccatggactcatgtgcaggtgggtgtgtctgttgtcatgtacgtcactctcataaccccccatacagggttgcacataggaatctcttcaagggaagaaaaacactctcaagcctttgcacttcctattcttctgcctgaaatgcctctctcccttcccctctcccctcacttggttacctcctactcatatttcacatcttggtttaggtaacagctactccaggaagccttccctgcctgctccaattgggtaaagtgcccctaaaagctccccttggaagccccctcccatcacagcactaggcactctgcccaactctgaatatttgttttgttttatttgttttttgagacagagtctcactctgtagcccaggctgtcgtgcagtggcgcgatctcggctcactgcagcctccgcctcctaggttcaagcaattctcctgcctcaacctccctaataactgggactataggtgcgcaccatcatgcccagctaaatttttgtatttctggtagtgacggggttttgccatgttggccaggctggtcttgaacttctgacctcaagtgatctgcctgctttggcctcccaaagtgcttcgattacaggcatgagctaccatacccagcccactttgagtatttgtgatggagtgaatataaaagtactactctgtgtcaggctccctgacaaatgctgtactcatgttgtcgaactctcctctaatcctgtatgatggggataattattatccccactttacagaggttgaaactgaggcttagaagagggtgatcacttgcccaaggtcacagtgtcaggaaggattccgctggactcgaaaccagaattcaaatccactatggcagctccttttcccccaaccccaaaacaaacaatacgaacaaacaaaagaaaaatttactaacccaccaagatgggctctggcacctacagaggcagtagagtggcaatgaaggacataggaattagatgggattcctgatcctggctctgtcaccttcttatgttgttgtgaccttcgtcaaacacctctgcaagtctgtgtctttatctgtaaaatggagatgatactaatatctgccctttagggtgattgttggttgtgctgggggccagtaggagagatggggttggactaacaagaggtttgggagtgggatagataggtttaggagtgtgcttccaggaggggatccagagccttacaggacttagtgctacatgagggcttagaaaggacagactggaagcgtgtacggcgggtggggattggcaaaggggtggaatctggatattagactattcagcctgaggttaagactattcagggtctcctaatcaggagtttgggttttctcctaagggtgctggggccatggaagcctgggagcgagagtgtgccatggttttatcatgtcttagaaagatccctcggccgggcacggtggctcacgcctgtaatcccagcactttgggaggccgaggcgggcggatagcttgaggtcggcagttcgaggccagcctggccaacgtggtgaaacccgtttctactaaaatacaaaaattagccgggcatggtggcgggcgcctgtaatcccagctacttgggaggctgaggcagaagaatcgcttaaaccgggaggcggaggttgcagtgagcctagatggcgccactgcactccagcctgggcgacagagggagactccctctcaaaaaaaaaaaaaaaaaaaaaaaaatgtgaagggtaaactggagggaggcagagtgcatgcaatcaatgctgtgatctcagacaagagaatctgtaaaaacacaaacaggagagtttatttgaagattcaggatttgggaagctgaacacaggaagaaaggagatggtgcaacacacttctaagccttgctcaggacttgaaatccagagtgccttcagttaaaaactcaaacactgaccctcaaggttggaccctttttggcttgagaaaccactaatttttcagagatgggtaactgagaccctagagaggaagggaagatttgttcaaggtcacacaggtagtcgacaatagggctcgacgcccgggtccggctccgcgtagggcatggcgctgccttgcaaaacagccacacccgccagcgacattcacaacccaccccccaaccctagaggacagcggggaaatcccactttcagaaccgagaaactttttacagccttggaacacggtaactttgggaggagaggccacaccaggtctgtttccccgcgcgccccttctctcattccctattggctctctctaccaggggtaccgtctggggaacctctggtcaccttgtcctccgcgcgctctgtggcgaaagggacctgcgcaggcgcgtgaagggcgccttcagggcccgcgctttacgacacttgtgcggcagcggcggcggccacccggcgctccttcgcgacggttcggccgggtgccgctggcggccgttgccagggtaggggtcgctttgcggcatggcgatggcggagggcgagaggactgagtgtgctgagcccccccgggacgaacccccggctgatggagctctgaagcgggcagaggagctcaagactcaggccaatgactacttcaaaggtgcgcccgcctggcagggagggtggacagtggcccaggctgaggggtgccgggcccgcgcggaaccatagcaacgcggagctgcagcctgggcgcggggcagacactaccaagtgaccgggcgtggggaggcccaggatggcgctgccaaggagcgacatagggggcttcggagagtgatacctaggagtggcgtgcggagcgggtgctactcagtggagagactgaggagggcgccaccaattgtggggcgagagggggactggaatgagggcgctaccaaacgtgaggcctgtagagggcgctaccaggcagtgacatgtggtgggggagtgattgatggcgctaccaaatggggagtcctggggtgggtgccgccaagtggggggtagagggggcacagccccaatagagaaggcaatcgtgggggtggggaatggatcattagatggggggaacaaggaagtaggagatttgggctgacccgaggaaaaggaatgtgatggtgggggccttgggagtaagggtggggatccttaagaatagtatcacttagaatattgagagtcaagtgtggggcacccattcattcattaattcaacaaatatttattgagtacctgttatgtgccaaggactgtgcttgactttggggatatagcagtgaatgagacagatgtggccctgtccttagcttgtaattttgcaggtgaaccagacatgaaaaaaaaaaaaacaaaaaaaaaccatgtaaataagtaaaatacttaaattgtgatgagtgctttgaaagcaaaccagcagtgtgatgaagtagagaataagggttggaggctactttagatagggtagtgggggaaggccttactgagcaggaggcgtttaagctgaaactcacagagggagaactggagaggagtgttccagggaggtaaagcagcctgtgcaaaggccctgggatggggaatgaaagggtactggcatggctggggctttggctacttagggggagaccaataacaagatgagattaggacagaggccagatcatgcagggtctccgtgagtcattacaaagaccagtttggaattttttttttttttttttttttgagacgggagttttgctctttttgcccaggctagagtgcaatggcgcaatctcggctcactgcaacctccgcctccctggttcaagcgattctcctgcctcagcctcccgagtagctgggattatagacgcacaccaccatgcccagataatttttgtacttttagtagagatggggtttcgccatgttggccaggctggtgtcgaacctctgaccgcaggtgatccgcccatctcggcctctcaaagtgctgggattacaggcatgagccaccacgcccagccctacaagaagacacattaagtaaatgggccagtctggactggagaagaatttgggtgtgatcaaactatggttgggaatggatgagatcatctagtaagagggtctagaggggggacttaggacagaacccaaatggaagagggtgaggctaaggaggagcacttagtgaggtggaaaggaagccaggaaaggtgtcgggaaggctgagagaagggagcgcttctagaacaaggagctggtgcctttagtccgatgctgccaaggcaagcactggccattggctttggctccatggatgctggtagtgatgttgacaggagcagttattggggagtgatgggggtgatgcagccaggaggtgctgaagagtgaatgggaggggaggaagtggagacagcaaatgttaagtgttaggagtattggttctgaaggggagtggagaaatgggggagggtggtaagacgagaacgtgcacaggagttcgagaccaacctggccaacatggtgaaacgacgtctctgctgaaaaaattagttgggtgtggtggcacacacctgtagtcccagctacttgggaggctgaggcaggagaattgcttgatccttggaggcagaggctgcagtgagccaagatcacaccactgcattccagcctgggcaacagactccgtctcaagaaaaaaaaaaagagagaagatgcagtgtcagggaaagatggattttttgtaaggatggaagagagtagagtccaatagagatggagaattgattctgcacaggagaggggggacttgcagcagcaaaaccctggagaaggcggaggtgggaagggtctggagccctggaagagacttggcctccaacgggagcagaagcaaagtgtggagaagctcgatccggtgggagccgtgagagggaggtaggaccagtgagagatgaggccagaggtagaaccttggaagtcagattggggaatatgggtgtcatcctgggggtggtcgatgccatgggaagtttcaagagcggggtgctgtggttcagttagtgttcagaaaagatccctggctgccatgcagagactggactccagggtaagacaggaaggagtctagattagtggacaggtgaggaggggtggtgatcgccagccaggctggagggacagaaatagattcaagaagtgtttcagggaggaagtgagagtggctgcctggagagagggtggacggtactccaggcagggaaaaaaaaaacaaaaacaggtggcaaaggcccaaaggtgagcagagccaggcatggaggccataagtggggccacagcgtaggaggctggaggaggttatgatgagtttgcagggagtagattgcgcagggctgtaggaaggagccagggctttctggggtggggtggcggtggggggtggggctctggggagccctgggaggttctgagtagggaaaggacagggtcaggtttgtgttttaggaacacccctctggaggggcaggacaagaggctgcgaggccaggtggaggctgagccaggaacctgggcaggagaggccagaccagggctgggtggggctggagggtgagaagggagtggctgaatctgagagatgttcaggaggctgacttggcagaataagtgaagtgactaccgggctttgggggctgagggatggagaggagtccaggatgaggctgtctcagccaggtgatggggtggaaggtggaattccctgggatgggagcagcctgcatgggggttgctgctgaggccgcatcagaattctgggccacagcagccattgggaggagcctgttgccccccaggacctgggatccaggctctcaggagtcctggggctgggcaggcagccagaggggcctggcactgagctggcacggaggagaacggccctgctggcccaggccccttgctgtctgtcaggcagtagcaggcacagagccccaggctccagggctgtgggaataacaataaaaaagaataatgacagctcaccttaattgagccttgtggccaggtacgctgtggggtttaatcctccccgggggctgggagatggctaggagtggccctgtttgttttataaaggaagcaaggctcggagaagtgaaaaaaccactcgcccaaggtcagagtgtgtgagcagcagggcccggatatccccttcctcgccacgtgcttggctcccacgttcaggttcctcccagagctgtactggccctgttgaggagaagaggggccccagcagggagaagagaggtcccagggctcagaggactgtcccctcaactgtggctggttgctctgtaagttcaggcctattccagaaatcctgggggcagagcctcgtcccccgtctcatgtctgagtctaagggaagtgtctcaactgtcttcccctctctgtgggcctcagtgccccgcttctgtaaaatggggggtgggggcttatgcttaacccctaaggaggctccaggtataagagcttgtggggaggaagcaggccatggttgagagctcaggctgcctgggttcaaaccctatgtcttcctttacctgcttgatgacgcctgggcaaatgacttaacttctctgggcctctgtttccttgcatctaaaatggggaatgtcttgaggcttaaatatggtcctgtttgtaaagcgcatagaacagggccaggatatggcatgtgggtcgacccgtggagtacaggctcctcccatttcctcttgttcccttcacttcctcccttcatttagtcattcacgcattcacttcttttgcctgcttcttttgctgcagccagttttcttacacaagttcgtaaaatcctcacggccacccagtgaggcagagctcagaaagaggaggctatttgcctgcagcctcgagttagagatctgcagagccgggtggcaggccctgagactccaggatcccctccctgtgccactggagtaacagctgccccatcaggagcgcgggccaggcagcctctggaccacagccaggaggcctgaaggagtcctcaaaggcgctggcattccagggagggtcggtcagatctgggctgcccagttctgcccttgtttgtttttgggaagtcccgggccctgccctcctggggcttacagctctggagggacacactcattactcaacagtgacgatgagagtggacagggctggcacaggagatcccaggggctggggcagcccagtcgggggcctgacccagcctgggagtaaaggagggcttcccggaggaggggacatgtgagcatttgaaagattgccaggagttggcgtggcaaagaggaatgttgttagattgttgctggccacatccccaggacccggcttctcccttctgtaatgtcagtcctcatctctctctgcatccctccttcctttccctctggagccactcatggagcctgggactctcttcttccatctcttcaaccaactgactcccatcctccaggtctcagccccagtgtcccctccgagctgccccaaccctaaacactgggcaccactgtctagggatggatctgtctcctccactggatggtaagccctgggagggcagggctgtgtgtaagaaggactctcggagtgctgttgagaacattaaaatgggagtgagggtggggactctgtgcagggctgctggtagaaggactctaggaaaccctagtccacagggggttcctcagtagcccagggatacccaggtagtaagaggcagagctagggactgggcccaggccacctactcctgcctctgtgcttacccctgtgccacgctcctgcccagaggtcaccatggcatggggcgtgagagtgggagccttttggtcttggcctggctcagaaggcccacttctcggccaggcgctgtggctcacgcctgtaatcccagcactttgggaggccaaggcaggaggatcacgaggtcaggagatcgagaccatcctggctaacacggtgaaaccccgtctctactaaaaatacaaaaaattagccgggtatagtggcgggcgcctatagtcccagctgctcggggggctaaggctggagaatggtgtgaacctgggaggcggagcttgcagtgagcggagatcgcaccgctgcactccagcctgggcgacagagcgagactccatctcaaaaaaaaaaaaaaaaagaaggcccacttgtcacctgctgtgtgaccttgagcaccggcctttcttccctgagcttcagtccccagatttggagacgggggttaatgtagtttccctgggcttgtgagagttcagtgaagggggacctgtgtactaaagccctgcatggctctggtacatcacggcccccagtggggacaagcctctaaggctgtttaagccttggctctcctgcctgtcaaatgggcacgagggagggatcaagcctggctctgcaggtgcagacagggcatttgaccttgagcaagacctccatggcttgtctgtaaaatgagcaccagatggtccttactcccgtggagacatgaggattccacaggtcacgaggtaaagtgcagggtacagctatagctcatctcaaataaaatccgacctctcctccttggccagatgtcacatcctgtcactccacacttagaacatcagtgtccagacctcactgtggctgcccggggcccagggatctgtcccaccagcctccctgcctcatctctcctccccctgcccactccacccagctgcctcagctctcactggccctcagacaaggctcaaccacctctgggcctctgcacctgctcttcttgctatcggagtgctcttccctcagtctgctgctagtgcccagcttggggctggaggggtgggtgggcgggtgtgtggagtcctggagactgtggccgagaggacaagccctgagctaggttggttgggacaggcaggaggggcaggctgaagagatgtctctgggctcagggtagccctcagcttccccatctgtgaacagggagactgggcgtcacccagcccagggcctgtcctcgcagggttggagcactgcctcatgcctcttcttctgtctccgcagccaaggactacgagaacgccatcaagttctacagccaggccatcgagctgaaccccagcaatgccatctactatggcaaccgcagcctggcctacctgcgcactgagtgctatggctacgcgctgggagacgccacgcgggccattgagctggacaagaagtacatcaagggttattaccgccgggctgccagcaacatggcactgggcaagttccgggccgcgctgcgagactacgagacggtgagctggggagtgggccaggcctggcacctgagccaggcagatactgagggctgggctggcggggacgggtgtgaggagccattcactcctctacttaccactcagccagccagcaagtgcctgtggggccttgggcccaggccagagtacccaggccacagctctgctcagccatctcacattttgtgaccctgagccagttaccccgcctcgccacaccttcctttccatatccgtgaaatgaggagaacaagaggatcagcctcaagggtagcggtgaggaaaagtgagcttttgcctttcacacgagtagaccagtacttggcccggggtcagtgtcctgtgatggttcacctgatggttactgtcattgttagtgctggtgctggacaggagccacacagcctctcttcttctggtggagcttgtctttcaggggcaggcagaaaacccaccactgaataggttagcagaataattgcaggtgaggatctgcactttgaagaaaagaggaagggcagtcgggcacagtggctcacggcagtaatcccagcactttgggaggccagggtgagaggattgcttgagcccaggagtttaagacaagcctgggccacatagggaggagacctcatctctacaaaaaatacaaaaattagccaagcgtggtggcacgcacctttagtcccagctactcaggaggctgaggcaagaggattacttgagctcaggagctcaaggccgcagtgagctatgctctcaccactccactccagcctgggcgacacagtgagaccctgtctcaaaaaaaaaaacaagaagggtgatatgctgccagggacagcagacaggatatgtgtgatatgctgatgagggaggggacctagggcacagtgagaattcgctagtgccctcacccacctaatgaaaatcctgacggtatgaggctctgcagagcgagcacacaccttcacaccaggtgtgctctgcatcttccttcagggaggctggctgaatcattacagcaccctgggacgtgggaactgggattactccccttgcacagatgaggaaacagtccctaaggggtgaagtcacctgcccagtgacccccacctggttagtagcagagctgggatttgaacccaggaggcctggcctcagggccttatctctcccacctcagagttcgctccctgagacggggccgtgcgcttgtcctgcgcatggggatggtgcagcagggggcttggtcagtgtgtgtcgagaggattgttatcctgccccccgacacagacacacttcactccctccttcccttgcaaccatcacactcggagctgcttgtgtcgtgtagggaggggcaaccagggagctgggagccgcgagtctgcagttggtcgcggggctgagaagcacgagtctgcagtcggtggagccagctcagacactgtcctggctgttggccgctggcctggggtggagggtggacttcaggccaggtgaaggcttgagctaagcatgagtccaggggacacatgttaggatgggggcagagatgtggcggggggttagggcgacacctagaagggtgggggcaggggcagcagagcagaggccttcccagcttgggctcccaagccattcttggccaagcccctccctcattgtctcttcctgtcctaatctagaaaatggtgacaagaggagtggccgcctccggatggctgtggctgtgatgacatggttgagtaaaggtcacgagctgcagggctcagtaatgagtaaccaaggacagtcggtgttgggttggggcagggctccaggtgggaagggggcctggggagacagtggggcagaagagaggagccccaaggacaggtttagggcagggtcttcatctcgtgtggggctgcaggagcatctttccccagggtaaggagcaggggctgcaggcagggtcttcgtcaagtgtggggctgcaagagtgtctttccccagggtaaggagcaggcttttcaagactctggcccagtctagggcccaaccccgcatactcccaaccccgcatactccctgaggctgggctggttggcttcagccatcttgtgggtgtgccacgtctgagctgtgtcccaggcctggcggatggcagggagggttgagggggtggggaattcagagtcttttacagaatacccagcacctaaattgtcatggcccatttccccatgggggctctcccagcagcattggggacccccacatgaacatgagggcttacctgtcatcaggccatccatatgcctgcaggccttcagccttgctcctttctgcgcagttcttcaggctccatgtgccctggggcagttcatcttcccaagactctacctcctgcttgctggatgctagagtttcctcctagaccagaagctcgccagggaagcagagcaaagacgtgaccttggccttgggcgggggagctccccttagcctcggtttcctcagcggtctgctcactctgggcccagcactgctgggagccctttgtgcacctgaattcagcctgaattcagactgaggcctagagaggagatgtccctcctccaaggtcacccagcagggaagtggcagagctgagacttgaacccctagtccatgcttgtaactgtttctgggccacaatcagttgaatagcttcagcacttttgtcttcatcaaacagagaattaaaaacggttcattgtttggaggaagtgtgtataaatattgttttgtggaaatgacttttcatttacacaagtacagatgagtgatggatgtgatataaaaatccctattttacatgtgggctgcaggcagagagtctgcggtcaccagtgcaggggctagatggggcaggctctgggctcaggacgcctaggttcacagccagctcagattgggtagcagctgcatggctcctagtgccttttttctcagccttagtgtcctcatctgttaaaggaggtgagaatataggaataacaaccaaagtgttttttctttgtttttgttttttgttttttgtttgagagagagtcttgctctgtcacccaggctggagtgcagtggcacaaatcttggctcactgcaacctctgcctcttgggttcaagcgatcctcccacctcagcctcccaagtagctgggactacaggcgtgtgccatcaagcccgggtaatttgtgtaatttttgtggagatggggtttcaccatgttgcccaggctggtctcaaactcctaggcttaaggaatttgcccaccttagcctcccaaagggctgggcttacaagcatgagccatggcacccggccccaaagtgttttttctattctctcagtcaacagttacacagaaaatttctgtgaccactggtcacgaaagggagtggaggtctctccctaccggcaaccaagcagtcgattctgcagtggacaccagctgggtgttctcttattgaattaattctgacactatctgtccagagatagcattagattccacaggttgaggacttagtccccacttgtcccttatttctgatgctgatcacaagacctaggttattttgccggtgattctgactgactggctattaattagggtttctgtgacccactccttgggttcaattaatttgctagagaactccctcatggaattcagagaaacacatttaccagcttattataaaggctgctacaaaggatacagatgagatgcgcagagcaacgtgtgggatggagtgcagagcttccgcgccctctcctggagcaccactcttcaggaacctccatgtgttcagctattcagaagctccctggacccagtcctttcgggtttttatggaagcttcattatgtagacatgattaattataccattggtcattggtgatcaacttaaccttcagcccttctcccctcccggaggttggagggtggggctgaaacattccaaccttacaggcccactttggtcattccagtgaccagcccccatcctgaagctacataggggtggctagccattagtcaacacatgagcatgcaaaaagacacatcactttggagattccaaagattttaggagttatgtgccagaaaacagtacatgatgaatatcaaacctgtatttcatagtaccactggccacccgtggtcttcaaacacagttccctcatatccaaagaatatacaactcaaaaggtattactggccagtttgttactagaactccattaggtcattaataattagttcatcatattatatgattatgtctcccagggtgagaccagtcaggtttgcaggtttctattcagtcttgccaatttccaaaagcaggcgtgatctcagcaaatatatggctcccccctttcaggcattaggtataattgagataagagacaatgtcacccttgttctgagcctctttcaaagtgttaatgtaatactggagatttcttaattcataactcatttattcattcgtttaccctcgtaaatgttcctccgtttcttcatttatacctgttgtcctaaaggaagaaactgaggcaaaattaatataagtagagattttatttgggccaaggttgaggaccagcctgggagcctcaggttatctcgggaagtgctccagagaacagataagctcaagcgtttaaagacaaaaggataaatcggggaggagtgattacaaagggtgtctttcaggaattctcattggtttaaaaaataacattgatcagtaattggctctgcgttattaaattacagggtgtaagtgatggcatccgtgtatggcattgtgaggttgatgtgtagctgtctctggactcttactcttgagtccacagggtcagtggcttcgggggatgagtttttctcaagatggggagtgggacatgactgctccctcattccagttcctctctaggctcaatcatttaaagggggtttgcattactcaaggaaaagtttcttttctttctcatttttcccttttggtcaaaatctttctttttaaaagcattgatcagagtctgagtgtcagggtgtccctcgtcactaggaaggctcactttaggacaggcctgttctatgttggggagggggaaggagatggctcagtgaggaattttcagtgtgtccaaaagctgaagtaggatggcctcacagagtggcaaaaagaagacctgaatcaagtcactgatttatacagctgcgtctctgtgtccaatcatctctagtcttcagaataccatgattttcattttctcggaagtaaaacaagaagattagtaatttaaatagtagaaatataatgcacataaggattataatgaaaacaagaatgtatatgccagaatgaaaaaaagagccttttccaattagggagccagctaaaaacatgaggaaaatgaaacccagcttctgctttggggacttactgtagccaagatagaattcaagattcagtacaaactgtaggcaagtaataaaaacccaaaaacagtggtcagggctagaatctaaacacagatgtgcaactgaagcatcatttttcctttccagtcccccagttttaccaaagacactaataatagcaagaccaatttattctcaaaataagttttagtgttatactttatttgcataaagtacagcaagattagtgactgaccatatagactccttttaagttggctttcccggaaaatgaggaatttcggattagactttttttttttttttttttgaggcggagttttcctcttgttgcccaggcaggagtgcaatggcgcaaactcggctcactgcaacttctgcctcctgggttcaagtgattctcctgcttcagcctcctgagtagctgggattacaggcacctgccacacacctggctaatttttgtatttttactagagacggggtttcaccacgttggccaggctggtcttgaactcctgacctcaggtgatccacctgcctcggcctcacagagtgctgggattacaggcctgagccactgcacccggcctgtaagatactttttgagaagaattaaagtaaaacaataattgcctgtgtatgacagaggacttagaacagccatggttaaagactcaattgaccaggaaatttggctatttctgcagcatataatttaacataataatcataattaataactgataacatatacgaggacatagtttcttttttagaaatctgtacaattttggaacatatattaatgagacccatacaaatataacaaaaaagatcagcaccatttcctacgtgacaatacttcccatatggtttttaacatcccagataagcctaatatgtctctcttggtcttccggggtccctgacatccagaagttagttcgaggtcaaaaagacttaattttagaatttgaaattagatttttctttgaaattagatttttctttttttttttttcttttttggagacaaagtctcactgtgttgcccaggctggagtgcattggcacaatcttggctcactgcaaccacggcctcctgggctcaattgattcttgtgcctcagcctcccaagtagctgggattacaggcatgtgccaccacaccccgctaatttttttgtattttttgtagagacagggttttgctatgttggccaaggtggtcttgaactagcctcaagtgatcagcttcagcctcccaaagtgccaggattacatgtgttagccaccacgcccagccctgaaatttggttttgtaaaccctacaaatgcatcaaaggtttgaaacacttaatcaaaataggatcacacatcactgtgaaataatatagtcattcatttagccaaagtgttaattagaagatttcaaaaagcaaaaacctttactctttggtagagaggagactcagtttcccaaataatcaaaagacctaataaagacagcataagagcaacagaatctttctctccctctccccttttttgttttttctgtgttgtttgtttgtttgttttttgggatttttgttttgttttgtgttttgcaatttacccaaaagataagtgaaagaaaattttttttttttttttttgagacggagtctcactctgtcgcccaggctggagtgcagtggtgcaatctccactcgctgcaagctccacctcccggattcaccccattctcctgcctcagcctcctgagtagctgtgactacaggtgcctgctaccacgcccagcgtattttttgtatttttatgagagacggggtttcactgtgttagccaggatggtctcaatctcttgacctcatgatccgcccgcctcggcctcccaaagtgctgggattacaggcgtgagccactgcgcctggctgaaaaatcttttattatcttttactaatactacaccagccgggcatggtggctcactcctgtaatcccagcactttgggagactgaggcaggcggatcatgaggtcaagagatcgagaccatcctgaccaacacggtgaaaccctgtctctactaaaaattaaaaaaaaaaaaaaaaaaaaaaaaaattagccgggcttggtggcatgtgcctgtagtcccacctactcgggaggctgagacaggaaaatcacttgaatccgggaggtggaggctgcagtgaggcaagatcgtgccattgcactctagcctggcgacagagccagactccgtctcaaaaaaaaaaaaaaatactataccaaaattttgctcaaaagagaaaaacaaattcttcctttgcatcaatgtattatttatggtaaagctaattttaataaaaccttataaacaaatctatccaatctcaatcagctttgaccatacaaaataagatttccatgaatcttttgtaatttacaaatttttccattcttttttctccctactttccatatctattcagtttatctcattttttctttcttttattccttcaatttaatacaacctttacctctaaactaagtaaaattgcttttcctttaacaaaaccacatcctctgtcttgtgtataaccttccttaccaaaaccacatcttagacgttctgtatacagaattgtttctcttggttatcacatattagaattttaactcttagtgaccgtaattcatagcaaaaacctaagaagcaagcaatttttaactgttagtcatgtagcagtaatttatgatgccatctttataatttttagaaatatagggtttctaatggaacaatttttcaatggaacaggacatttttcctaacagatctcagtatcttttgtttctctaaaataagaagtcagaagccatatttagtagttactgtcttagcatcatctcttatttggaaatgatctagatattcaatgaatatttgtcattaatttagcttagtaaaaccctaagggcataattaccaaaagatttgagaaacctttttaagtaggcatattataaaacataattattattaaaagttcatttataaagttgattctatttatatgtatttaatttattcatttttagtgattgttgggaaaatttcgtgagacagacaaatccaaccatcatctcaagttaaattttctattaaccattttttattattgtacgttaggcaagtatcatagaagtaagaaccttaaagttagatacatacatattttgctggtaactcagaaaacatagtttttatttatttatttttattttttatttttattttttttgagatggggtctcactctgtcgcccaggctggagtgcagtggcgcgatctcggctcactgcaagctccgccgcccaggttcatgccattcccctgcctcagcctcccgagtacctgggactacaggcgcccgccaccacacccggctaattttttgtatttttagtagagatggggtttcaccgtgttagccaggatggtctcgatctcctgacctcgtgatccgcctgccttggcctcccaaagtgctgggattacaggcatgagccactgccccgggccgccgacatagtttttattaaaaccatcccggctaaaacggtgaaaccccgtctctactaaaaatacaaacaattagctgggcatggtggcgggcgcctgtagtcccagctacttgggaggctgaggcaggagaatggcgtgaacccgggaggcggagcttgcagtgagccgagatcccgccactgcactccagcctgggcgacagagcgagactccatctcaaaaaaaaaaaaaaaaaaaaaaaaaaaaaaaaaaaaaaaacaattttaaactagttttatttgccaaaagatttactgatttactcaggtcatgtgaacttggaaaatctttgggcttactttctttatttttttctttttcagacggagtctcactctgtcgccaggctggagagcagtggcgcgatctcggctcactgcaatctctgcctcccagtttcaagcgattctcctgcctcagcctccaagtagctgggattgcaggcacgcaccaccacatccacctaattttttcatacttttagtagagatggggtttcaccatgttggccagatggtctcgatctcctgaccttgtgatctgcccccgctcagcctcccaaagtgctgggattacaggcatgagccactgcacctggcctcggtttaccttctaatttgtgagtgctcgtttgtctttaattttgtatcatgtagataatatacaaaaacatgtatagacataacatatatgtagacacaacatatagcacacatgtacacatgtatgtatcgacaagttacagagatcaaggagctctatgtaaaagagaatagagctttagacctgagaggagcctgtttacccacaatgcttggggctccatgaggataaacagaggttcactcatgtgataccaaaggtggcaagaggaaggagggacagacagcggtacatcaaagaacaggacttagaggagccagtcaaggagatcttgttttccataaagcaattaagttttacattatccttggcaaaaatcatgtcaacaagaagaaagagggattgtgtataattaggagcagtttgagaagagaggaaatcagagagaacagaggcatcaaaaaatatatatatacgtgtgtgtgtgtatgtgtgtgcatacatatgtagccaaatatcagcttttaatcaagtcagcttttgactatagagctctttaaaaacttttaatcaggttttagccaggcagatagtaaacattcggccagatgcagtggctcacccctgtaatcccagtattttgggagaccgaggcaggaagatcacttgaggccagaatcctgggcaacatggcaagacctcttctctagtctcaaaaaaatgtttttaaacagatagcaaacctatctgttccttggctttccctttctgaaattcacatcaaggagtttgctttgggaggtgggtcatatttgtttattagaggtctagggtaatcattatttaaagctatttgtcttttgtaaatcttgcagcaaagttcagcagacagttggagcatttaaagggttttctgggggagtttcctaaaaaaaaaataattgtacctttcaaatctcttatgagattgcagccaggacaaataggaagtaggtctccattcgatttgtctggttctaaatcctgccttttccaattgtgtgcacaaatacattaatttaggaatttcaagaccctcatttgggccattgcactttggggtatctcacgccgctgggtccatttacctaggtatttgcaggatggcgctccataggtattagacataaatccagctggtgtttcggggccggggcgggggggctgtcctttaaggcaaagctcagtttcaatgagcagtttcctataattttatttatttatttatttgagatggagtcttgctctgtcacccagcctggggtgcagtggcgcaatctcagctccctgcaacctccgcctcctgggttcaagcaactctcttgcctcggtctcccaagtagctgggattacaggcatgagccaccacgcccagctactttttgtgtttttagtggaaacggggtttcatgatgttggccaggcaggttttgaactcctgacctcaagtaatctgcccacctcggcctcccaaagtgctgggattacaagcgtgagccaccatgcccagctaatgtttgtgtttttagtagaggcggggtttcacgatgttggctaggctggtttcaaatgcctgacctcaagtgatccacctgtctcagcctcccaaagtgctgggattacaggcgtgagccacacacccagcctcctataattttagaatttccttctcaaaagtgaccaaggccaggacagtatattgcgtcgaggtgtgccgctttgtgggtgtcactcttccaggtgtcaccagtgaatcgtgaggcatgttcttatgtgtcttggaatctcttatcaccttgtggcagcagagtgcttcaggtatcagagtgaccagtcccttattcatacctttccagctgagcaagagtccttactggtcttcttcctaatgggaggccctttaagactccaacacgtcatgcatggaaaaacatccccatacctctgcaaagtctctggttgcctaaagaatccagtgggtcaaagggggcaattttctcttctctttgaggcaagatgacttaccctcatgcagcttagtcagaagcagctgcaatttaaaaagcatgctgtctaatttcagcccagaagtgcagccaccagtgccagaatgccagtactgtgacccgggcctcctgctgtgaagcagcggtggagaaggcagttttctttttttccccctgaaactcgaatcccttgctcatagacaaagatggaaaccttcattctagaaaaagagagatagaaccactcaaataaagtctagacctcatctgacaagagagggggtccagattcaggagcactcacccttttgcccccagtgaacctgtggaattggaggaacacagtgggtttgttctggtactgagcatcgagtccaggggcacccagtgtctgagtgggtagctctgaaccctgctcacagggccaaaaaacattgacataaccgaagaaactgaggcaaaattaacatagacagagtttatttgggccagggttgagagaattgcagccctggaaacactttaagttaccttgggaagagcactggagaacaagggagaggcttgtggtttttgttttttttttagagacagaattttactctgtcacccaggctagagtgcagtggcaccatcattgctcactgcagcctcaaactcctgggctcaagtgatcctcccacctcagcctcccaagtagctgggactgcaagtgcatgccaccgtgcctggctaatttttttctttatcgtagagatggggtcttgctgtgttccccaggctgatctcgaactcctggacttctgcctcagcctcccgaagtgccaggattacaggtgtgaggcaccatgcatggcctgcttgagcttttaaagaaaaaaaggacaaatgagaagaggggtgattataaaaggggttttgcaggaaatatcattggtttacagaaataacattgattaataattgcccatccattgtggaactagagggtgtgagttacggtgtctgtggttggtggcagtctagagtccacgtagcacgtggcttcaggcgatgagtacttctcttaagtgagaagtgggatatgactgctgtcctattccagtgcctctctgggcctgatcatttaaaggggctcaccatataacttttctttctcatacccacccttttcgaagggacattggaattggccactgtgctggatctaggtcgtaggcagcaaagtaatctagcacatgcctcctcttagatcacttccattcagatagggtgtggttacataggtgcgggactagtgggctatttttatcagcaggctatataactgcattcactgttagccccagtttcaccagatggtgtgaaagcacaacccactcccatccggcccttgggaattctgacagaaggtttaaaaacatagttacggtttcttaggaattatccctgcttccagcacttggtgctggtagatagagccttggtgctaggaccattacatcaggtaggagaaagaaagagagaaataaaatttataatcactgtaccagcgtatttctcccttggctagaactgcagagtcacaccaacatcttccccagattctgcatgtaatgttgctgcttggggagtttgagaagatgctgacagtttgaagcagggatcagaaggtggcccaccaggagtgagctggagatgcccggtctctcttggtttaacatagaggacggggaatcaaaggcttagggaaattgtaatgcttgagtggatttgtaacttaaaacccactcacccacactggagggtccagagaacacacctttcaccaatactttgagaagcagatttatgagggggccccggcatccctggttgctcctctctgcaagctggaccttacggtgggaaccgcagtcactcagttggaaaacttacatgcagtgggaacaattagatcctggagaggcagggaccaagtgtcagcactcagctgctgaaggcaagatgtctgtcatggacacagaagcaaatccacaattagaataatctgactgttgcgccccagtcagaataagggcttatgggggcctggtgatgaatggagttttagctcaggtccgactctcagtgggttgagttggtccctggacccctcctgtggtcatttcccccgttccagctgcacaattggaataaatgtactcagcagctggcggaaaatccccacgttggttccctaagctgtggagtaagggccattatggtgggaaaggctaaatggaagccatagagctgcctctacctaggaaaattgtaaatcaaaacagcagcacatccctggagagattgtagagattagtgccaccatcagagacttgaaagctgcaggggtggagagccttaccacacccccacttcactctcctgtttggcctatgcagaagacggctgcatcctggagaatggcaggggattatcgtaagcttcaccaggtggtgaccccagttgcagctgctgtaccatgcggtttcattgcttgagcaggtgaacgcatctcctggacctgccatgcagctactcgtggcgagtgtcctttctccatccctgtccgtaagacccaccagaagcagtttgctttcagttggcaaggccagtgccacacccttgctgcctgcctcagggacatatcagtccttcagccctgggttacagtttccttcacagggatcttttctttttaaaaaattaatgaaatttttattaatttgttacctttttattttaatagctttgggggtacccgtggttttagtggcatggatgaactgtataacagggatgaactgtatagtggcagagtctgagatcttagtgtacccgtcacccgagtactgtacagtgcacccagtacatagattttacccctcacccctcccactctcccccttctaggtctccagtttccattataccactctgtatgccttgcatacccatagcttagcttccacttacaagtgagaacatagagtgttttattttccattagtgagttatttcacttagaataatggcctccaactccatccaagtctacaaaagacattattttgctcttgtttacgggtaaagtagtattccttcatggggatcttgatcacccttcccttctgcaagctatcacactggtccacgacactgatggcattttactaattggacctagtgagcatgaagcagctactctgtacttattggtaagacagtgtggagtgaggcaattctcctaataaacaccctctcatatatatccacatgcataggtatagtcatgcattgcttaacaaggggtagtttttgagaagtgtgttgttaggtgatttcattgtgtgagcatcatagagtgtgcttacacaaacctcgatgttacagcttactgcatacacacctaggttatgtggcatggccgagtgctcctaggctacacgcctgtacagcatgttactttagtgaatgctgtggcaactgtagcaaaacagtaagtatttatgcatctgaacgtagaaaagggatggtaaagtcatggcttacacctgtaatcccagcactttgggaggccgaggcgggtggatcacgaggtcaggagatcaagaccatcctggccaacacggtgaaacaccgtctctactaaatatacaaaaaattagccgggcgtggtggcaggtgcctgtagtcctagccactctgggggctgaggcaggagaatggcgtgaacccgggaggcagagcttgcagtgagcggacattgcgccactgcaccccagcctgggtgacagggcgagactctgtctcaaaaaaaaaaaaaaggccaggcatggtggctcacgcctgtaatcccagcactttaggagtctgaggcgggcagatcacgaggtcaggagttcaggaccagcctggccaagatggtgaaaccccatctctactaaaaatacaaaaattagccaggcgtggtggcatgctcctgtaatcccagctactcgggaggctgaggcaggagaattgcttgaacccgggaggcggaggttacagtgagccgagatcaagccattgcactccagcctgggcagcagagcgagactccgtctggaaaaaaaaaaaaaaaaagataaaatctagtacacctgtttagggcacttaccatgaatagagcttgcaggactggaagtttcactgggtgagtcagtgcgtgagtggtgagtgaatgtaaggctaggacagtaatgtgtatgtctgtaggcttcataaacactgtacactagattatattaaatttatttttaaaagtttttggttcttcaataataaattaaccttagcttactgtaacttactttataaactttttaattttttaaaactttctcactttgttgtaataacacttagcttaaaacacacatatacacctgtacaaaaatattttctttatatccttattctgtaagcttttttctgttgaaaaaatatttcttttgctttttaaacttttttgttaaaaacgaagacacaaacgcagacattagcctaggcctacgcagggtcaggagatcagtatcactgtctcccacctccacaccgtgtcccactggaaggtcctctggggctgtcacacgcatggagctgtcatctagggtgacagtgccttctggatacccctgaaggacctgcgtgaggcccttgagaaggtgtggttcttttcagaaaaatgtccatggtggttcgcttggcttcttttttcgtcatggatttgtgtgagtaatggcgttgtgctgagacattcccatggctgtgctgtcaccaggcaataggactatttcagtgtgtttatcttctgggaccacacttgtatatgtgggccactgctgactaaacatcattatacagctcatgactgtgtgtatgtctctctcttttttttttgagatgggtcttgctctgtcgcccatgctggagtgcagtggcgggatctcggctcactgcaagctccgcctcccgggttcataccattctcctgcttcagcctctctagtacctgggactacaggtgcccgccactgcgtccagctaattttttatatttttagtagagatggggtttcactatgttagccaggatggtcttgatctcctgacctcatgatccgcccacctcggcctcccaaagtgctgggattacaggcgtgagccaccacgtccagcctgtgtgtgtgtgtctctctcattagttctgtctctctggagaaccctgactctcatgatggatgtccctcacggggtccttttccggaagacaccacctatgttctttcctgtctatgcttggaacttgggtgcaaacctaggccggatctgggggactccctctgtgctccctggcccttcctgggatctcctgatttttgttctgtggctttgggttccttacatcagagtccagcacagtcagttagaaatgcgtgttgccttgcaagcggatactagtgcctgtacacctacagcatggatctgtgaaagtaacaggaatagtcacaaccactatttcatccagcgctcgccagggcccagggtgtgaccttcatgcagtaatataactcatttcatcttcacggctaccctgcgcagtggagactctctttgtccctggtttataggtgaggaaaccaaggcccagagggtagctcactccactgaggttgcacagccaggaggtggcagctttgtcccagagtcaggccataagcagggcaggcgcagcgggtccgagtttctcggcacagcactcacccttagctcaggcagtgcaccttggtggtctctctgacttattatacagagaatgctgggtatgacttgccaaactcattcaccagaaactaacccactagggtaaaaacccttatgtcaggcttcaggctgtcactagcagcggcatttcctgccctggaaacctgacttcccccagctgcctgcatgcctcaggcaggcacggctcccttctgggctgctgctcattgtctgcatgttggagatattcagaatgccctgttacaccttgtactgtgggtccactccatgtgggatcttgatgctgctctataatccctcacccttagttttaaaacccaagcagttctgaagaacagttgttctggtaagtttgggcagctcgttcagtggcaaaacctgacctgaactactaagaagctgctgatggtcttgattactctccagtggcatgtctggaggttttgctgcagaaatggccgtgtatgtgcttgtgattactaggtactgccttggacctgctgggggtgtcctatgatagagcatgtacacaaaatcatgtgggtttttttgtattgttttgttttggtttttttttgagacagaatctcactgtgttacccaggctggagtgtgatggcacaatcatgactcactgcagccttacctgggctcaagcaatcctcccacctcagccccccaaagtagctgggactacaggcatgcaccaccatacctggctagctttttgttgttgttgttatttttttctagagatagggactcactatgttgtccaggctggtcttgaactcctgagctcaagtgatcctcccacctcagcctcccacagtggtgggattataggtgtgagccaccacacccggccatctaccaaatcaccttactaaaatccaaaaaattcccaatccccaaatacacgcagcccccagggcttcttcggggattgtgaacctgtgttaccatttcaccagctccagacatcattacccatgagtactcgctgacgaagataatgcttttagaaacaacttgtttacttagcactgtggattcacctgcagttgtaagaagtaatgcagaaatcccagttttccctaaaggtatatctggcataactacataaatatcacagtcagaatactgaccttgatacaatccaactgccactttaaaaaaaaagttcagtgtgaagttctgacccggtgggccttcaggagctgagtcccttctggtctggactgaatgaccttcctcaggagcaggagcccagcagggcatcttcactgtcccagctagaccttgcgtgtcgcagcagctacagtagcagcaggccttgggatgagcacttgcctgctgctgcctggcattaagttctcacgacaatcctccagggggtgctggcaccacccctactttctagaaactgagggaggcttgagatgtgaggccgcctgtcctggcaggcctggattcagacccaggaggcctagtcccagagcccaggctcataaccactgccccacgctgcctccctggagggcatgcagtgtgccccagggacgagaggcccaggcagggaggggaggtggtggaaggggagcccatcccagcgtgcatagcggaaatcaggagcctgggctttggcgcagtttcgcctgggagagaagggaatcctggcttcctgggtgggtgacttcacctccccgggccttggttttcttgtctgtcagatgaggattgtgaaaacactgccatgtagaggtgcatggaggataaatgagcaagtgaattgcttacacaatattaggcacatagtaagtgctctagaagtgagctgtgtattattattgttgccgctgccactgttggtattcccactccctttctcctccctgcgctgtcattgtttgccttcatctgccttcccagcccgcccacccctggagaacaggagactggcggggaggaaatgctcagtcactcattcatttctttggagaaaggggggaagggaaattcattgactgctgcacgcacagctatggctgagcctcagccctgccctcacagggccaccttccagcggggtggacagaccggttccgaaccagcagggctcacggctggaacaagggagcccaggggcctttgggagcccagagggggtgcctgacccagcctctggggcttcctagaggagggatcagtggggctgagacctggaggaggagctggaggtgcaaatgaggtgctctgggcagaggcagcctgcataaaggcctggagccagcatgccggggacatgagtggtctggctgggaggtatagaggggtgggaggagccgcatgggccaggccacatgctggtttggatgccagccgggtgtgggcacataaccactcctcattgggaaggatgccaggggctgcctggcactgtcttcctcccctgccttacacccacccacagcccaggtggagctgcctggcagggtgccctaggcctgcccagacagggaggaggccgtggcctgctgggcctgggctcttctcaccccgcttggcgcacacacctgtttccagcatggatgagcctcaccccctgcttctgtcacaccaacctgcaggggtcagtgggtgtctctgtggaggtttctgagtcacgctgccaggctttccaccagaggccacccctgctccttgagggccggccctgggacctcccagtctgtcctctggcacaggagatacgggggtctgctcctggggaggctaaggatggtgggcaggtcagacgggggtctacgtgactaaacaggtgaagtcacttgcccaaagtcacatggcaagtaagtagcagagccaggatctgaatccagcccccaaatccagtctgcttttcaggttagaagatcagagtttgcaggaatcggggtaaataaggttgcggggatagggctcctttcactgggaacttgctatgtcccaaagctgaacgccccatgcctattgtgtatgatctggtcatcagcgcagcagccccagaagggggaccgtgaagagcagtgggcgcccacgtggagtttcctttcacctggcaccactgtgcagggttcacaagcattcacccatgcagctctcccagtggccctcttgagggagatatatatggttctcagtcccacctcagagagaaactgagccacagagaggcagactcacctgcctgaggtcacccagctcatgacttgcagagctgggatttgaacccggtctcagggatctgtgaccctcagttcctctcttcagtggacaaaacagggaaatcttttgtcctgggcctccccagagtgtgagggagggaagtaacagcactcggtgctgctgcccacctgcccctgctgcatgccgggccccctgtgttacttattccttcccacagccctggcaggggagccctgtgtcacctccctgttagagattaggtaacctgggcttggggagtccatgtcgtccagcaagtcattggccctttgtgtgagtctgggctgttctgtgaccgtagacccagccgggcccttcctctcatgctccgccaccttggtagtcacgatagtagcatcaggacctgtgcttgggatgctgctcaccccacagggattctcacagggcacctgaagctgagcccgcagtcctcagacaggcagttgtttgattttagcgcgctcatagctaagattgatgaagtgcacccatgcgggcagctttgctgtgcccagttttggggtgcagaaaccaaggctcggcagttaaatacgtctagggttgcaccatcagcacctggcgcccaggcggtctgacttccactttcatggaacccagggctgggcagcctgggggcaaccgctgtgcccccacctcagcctcagtgtgcacgccccttccctcccacccaggtggtcaaggtgaagccccatgacaaggatgccaaaatgaaataccaggagtgcaacaagatcgtgaagcagaaggcctttgagcgggccatcgcgggcgacgagcacaagcgctccgtggtggactcgctggacatcgagagcatgagtgagtcaggcctggatgctccacgctccagcccagaacattccacacgggccttctccattccctgggggtggggttgggctcaggggtggccccttgttctgtccccaggctggtgtctgtcgctcctctgcctgtgttccagggcgctccatccacagcccaaagctgggcctcacgcttcccagtgagcgagattggagagccatggtccccctgccatttcacgggcccttcctccgggtagtagcacagtccccacaggctgtgtctgattcacctctaggtgctgagaagatccaagggattgttgtggatcatcccacagatgattattgagcatctcctatgtgcccggcactgtcctaggcactaggggtacagctatgaacaaaacccttcctgtccacatggagccgatattctaggagggagataagatgatgaataagtcatgaaatgaatagtgctaagtgccataaaactgaatagagtaaaggggggtgggtgaaggaagacagggaggtcaggaagaggcctctgggccagacctgacccaggaggggactcttcactcactctgtcccgctctcgacctgtgtgtccacacccaagttttccccatccctgggagcgagacccccttctccctcatagtggctgtggtcactgactctcgtgtcccgttgttcacaccctagccattgaggatgagtacagcggacccaagcttgaagacggcaaagtgacaatcagtttcatgaaggagctcatgcagtggtacaaggaccagaagaaactgcaccggaaatgtgcctaccaggtaatgcatctgtcaggtactgggcacccgggaaccctgggatggcatcacagcactgccagccgcgggcactgagcaaaacgacaggagaagggcggccatgacagccaacaccaaacaggagtcgtgtgccggacactgtgccgagggcttaccacatgatctcatctcgtcccacagcagtttggggaggtggcaggcagtgccatttgacagatgcagggacaaagggccagagaggtcaggtgactggcccagggtgaaaggtgaggaagcagtagagtctgttgctttgagttctcatcccaggctcttgggcgtctgtggctgctggttgttgcaggttgtttgggacctgctggttgctcctagtcctgagaccaccccctccccgacctaggagggcagctggccacagggtgttaactggttgagtgagactcaggctctggtatcccatctggacaaggccccctgccctgacctctcagggctacagggaccttaccatagttttggggaactgctgagatccaccacctcctgggttggttatgaggatgcgggacttcttgtgagtcaggttgacaggcaggtgactcttacaggagtgtgcaggcaatatgggaagccgccatttgataggtcctagagagccaagtggcctgggttcaaatctctaccttcccacatactagctgtgtgcctgtgggcagatggcttcacctctctgtgccttgatttcctcctctgtgcagtggagataatcatactgtctccaccaagggctgttgtaaggagtaactgcgtgtaatccacatcagtgcttcgaatagtgcctagcacatggttagtgctctgtatgggttagctgttgatcatgttgttaaaggtgagacaggaggaggaatgtccacattcctggttgtttttaattgaagtataattaatgcacaataaaatacacaaatctgaagtgtcctgttagatgagtttttagagttttatgtgcccactgcccaaacaagttacagaacatttccatcaaccagaaagctccctttgacccctttctagtcagccctcactcccatcccaggggcaaccactgatctgatttttcaccactgtaaattaattctgcctggttttgaatttcatttcaatgtcatatgggcttacagcgtttagtgtctcttctttcatgtggcacaatgtgtgtgggattcatacatggatgttgtgtatatcggtagctcaagtcctccattgtctgaacagcccatgacttgtttatgcagtcttcttttgagagacatttgggttatttctactttgtagcttttataagtataagctgctatgaacttcttggacaagtctttttgtgaacatgttttcattgttcatgttgaatttctctattgattgtcttttgtttcattgatttttcattcattattctctatgcatgcttgaggtttaatttgctttcttctggcttctgaagatggacattaatgctgttaattttacatcttttcttccacacaaagcatttaaaactaaatttccttccaggcagtaagttagctgcgtcccgtgaattttaatacgtcgtattttcattatcattgagttagaattgttttctaattttctttatggtttctgattttatccatagattattgagaagggtattgtttaactcccaaatatttggggacttctagatgttactgttactgatttctaatttggtcagacaacacactctggatgattccattggggctatttttagatctgtcttggcaaacatgcagtatgtactggaaaatagtgtgtattttgcagtcgttagtcatagggctctataaatgtcaattagttcaagatggttgagactgctgttaaaaatcttttatagcctattttttctaattgctcaatcatttattgagggggctgttaaaagctccgactatacttgtagatttgcctatttctccctataattctcagttttttgcttcctgtattttgaaatttttattaggcacacatttaggattgttatgctttcttgatgaattgactcattataatgaagtgacttcagtactttttggcttgaaatccctgttttctattaaaatagttaaaccagatttttacagttaatatttgcatgctataacttttctacccttttgtatttaacccattggtatctttatatttaaaatgtttttcttataaacagcatatacttgggtcttgcctttttatccagttggacaatctttacctttttttttttgaggtggaatttcgctcttgttgcccaggttggagtgcaatggtgtgatcttggctcactgcaacttctgcctcctggattcaagcaattctcctgcctcagcctccagagtagctaggattacaggcacacgccactatacccaactaatttttgtttcgttttgttttttgagacggagtctcattctgtcaccagggtagagtgcagtggcgcaatctcagctcactgcaacctctgtgtcccagattcaagtgattctcctgcctcagcctcccgagtagctgggactacaggtgtgcaccaccatgcccagctaacttctgtatttttagtagagatgggattgtaccatgttggccaggatggcctcgatctcttgacctcgtgatccacctgcctcagcctcccaaagtgctggaattacaggcatgagccaccatgcctggcctgatttttgtatttttaatagagacagtgtttcaccatgttggtcaagttggtctcaaactcctgacctcagataatccacccacctcggcctcctaaagtgctggaattacaggtgtcagccaccattcccagccaatctttaccttttaattggagtgtttagttcatttatgtttaactatcagcaatcatatgattgcatttcaatctactgtctagatgtctcttttctatatgtcccatttgtttttttcccccttgtttctccttctttgactttcttttgtgtgaatcaggaatcttttagcatttcatctgttttattgaattttttgttatacttttgaatgtgtgtggcgaggggtggagtgttacatggttgctctagagcagcccttctcagctgaggctctatagagagaattaagccctaactcccttaggcatccattatatccgcagtgaattaactcctctcctgtgaatctgtgtgctctccttgggagaactgagcagatatcactgaaaatattttttgtggggcttaatcatttcccggaaccctggatgaaaaaggctgctccaaagattacaatgtgtaactttaacttgtcctattctactttcaaataataatatgatacttaatggacaatataagaatcttatggcctggggcagtggctcatgcctgtaatcccagcagtttcggaggccgaggcaggtgaatcacttggggtcaggagttccagactagcctggtcaacatggcaaaaaccccatctctacaaccctgtctctactaaaaatacaaaaattagccaggcatggtggcacacacttctaatcccagctgctcgagaggctgaggcagaagaatcacttgaacccaggaggtggaggttgcagtgagccaaggtcgtgccactgcactccagcctgggcaacagagcgagactccatctcaaaagaaaaaaaaaaaaagaatcttacaatattgtgattgcttttattttctcccagcctttgtgctcttgtcatgcttatgcatctgctataaatacattgttgtcatttccttaaatagacactagtcttctaaagaaatacacgtatgaatacacagaaaatgtcttttatatttaccctttctcttactccttgtttcttcttccatatgtgagtttctatctggtatcatgccccttctgcctgagtacttttagcatttcttacagtgcacgtctgctgtagactaattctctcagctttggtctgcctgaaaatgtttttattttgtcttcatttttaggggtgtctttgctggatgtagagttctaggttgacattgtttctttcaaggctttaaatgtgtttttttcccattgccttttgacctccattgtttctgtgagaactcagcaatcattcatatctttgttctatatagtctgcttttttcttcactggttttaagatgttgcctttgggttttagtagtttgactatgatgggctttgatgtgctttttttgagtctgtgggttaatatctttcattagttttggaaagttcttagccattatttcttatatttcttcccatttctgctctcctctccgtctggaaagctaataacatgctctttgatactatttgatactattccttagatcttaatgacctgaatttttttaattcttttcacgatttttcctctatgtatttcagttcagataatttcagttgtccttatgttcactgattctttgtaactgctgtcaagcccaacaaatgaattatttatttcttacattgtattttttattggtagcattttcatttagttgtgttttttttaatagacttttcatctctgtgtctcatgtgttcatgcatgttgtccaccttttccaccaagtcctttcacacatttaccatggttatcttaacgtctctgtctgatagttccatcatctggttcatctctgagtctgctctgttaccagttcttcatgtgttttacaattttattgtatgccagctattttgtataaaagaacattagagactgaggtaaataaagtttttcctcagaaaatggcacacttaggctgggcaccatggctcaggcctgtaatcctagcactttgggaggccaaggtgggcagatcgcttgagcccagtagttcaagaccagcctgggcaacttgtagaaaccccacctctacaaaaaaaatacaaaaattagccaggcatggtggttggcacctgtagtcctagctacttgggaggctgagtggggaggatcacctgaacctgggaggttgaggctgcagtgaactgtgttcgagccactgcactccagcctgggtgacagagtgagaccctgtcttaaaacaaataaacaaataagaaaatggcacacatttctcctgttgagccacaagagggaggggctgtgtgaacctcatctgtagtttaggggcagcttttattggagtttctttaccaccggctttaaatgtgttcagagtagaattaggactttcccttcagcagagcttgggatcttagccctggcagaattccagggatgtctttatgttttaaagtcgccagcttttggaactgtgggaggcctctggtattcagccctgccgccagactgtggggccactggggtgctctccgctctccagtctcgcccccacttctgtacctcaggaggtttctctgcacctcactccctcgcgcccaaccttccatgaagcccgtgtgagggagttggcagggggcagaggcgggctgtgctggggctccctggagtcctcatctgtcacgccagtccccacacggtcatgaacttccactcatttcccctcacgcagggcatcccgccctgctgcctcgcaccagggtgaaagctgtgggctccttccccaaggaagggctcgtcctgtctgcattttgattaatttaggtccctttgcattgccagctctcagatggctttacctttgattttgttgcttgtttggcttgttttcatctttagggcgagacagtcttttgtaacttttctaccttctgactagaagtggatgccgcctgcattttcttaacacctttttccccagcttattttggaaatcgtcagacctacagagagctgaaagaacagtacagttaacatctgtccacccttcacacagattcaccacttgtgaacattttaatgcattaactttatgtgtctgtctacttatttatgcatttgtatgtgtatacttttttcttttttttcccctaacccatttgaaagtaagttgcagccatcataacctggatctcccaaaaacaaagacgtcctcttgtgtgaccacagttgaattgtcctaccttagaaattcatcattgatgtgataatactgactaaggtagacagtccacaggccatccggaaaatctggaaacattgacaaatatgcatgtcattgtcaaggtcatatccaatctgtgaaaaataaatcatctgcatttctagacatctattagtattttaattctccccagctctccccaaaacatcctttttagctgcttttaaaaaattcagcgtccgttgaaagcaccagtgttgcctatgacctgcctttttacctctttttacctagaaagtctcacttcttttttgggagactcttttatgacagtgacattgcgctgtgtccaggccagttcttttataaaatgttctacgatctggattcatgcatgtatttccacttgatgctgagtattttaagataattcaagaatcaggttttcgtacaaaacaatcgcaatgcttcggcactgcacaggccacagaagcctgcggctgcctccggccccgcctgctcccgctcccccaggcctgccctgccctttttcttctctccctgcttctccctcgccctcagcccagcagcgtctcatgggcagtccaggctttcggggccaggttgggcagcagcccctgcagccggtcccactgagtctgccctgccttccagattctggtacaggtcaaagaggtcctctccaagctgagcacgctcgtggaaaccacactcaaagaggtgcgcgttgtggggcagtgcggggagggccagcgggggtgggctctctggctggggaggggccacagagctcaggaactcacggatccacctccctctctccctcacaccccacccctgtgcctttcctcctgaatatcccatttctctcctggcctcttggtcttcgtttgtgttccctgcttgtgtctcttgcatgattcttcttggtctactgtgaactcttacccttcccctcacctctgccccctccccacgtctctctctcggcccgtccctctccggtggcctcttttctttcagacagagaagattacagtatgtggggacacccatggccagttctatgacctcctcaacatattcgagctcaacggtttaccctcggagaccaacccctatgtatccttctcagcagagccaccctctccccacctccacccccagccgcagcctcaggtctgcacagagtgggaggagcccttgccaggaaaagacgtgaccttggaaaggagaggcctggccatgctggggcaccaaggtgtgggtggagctgcaggctggccatgcaccccaggctccaggctcggacaggcctgggccagcacccacctgctgtgtgacctaagctggtagctcagtctctctgggtcttggcttgtcttcgtctgcctcaggatcacatttgaatggcacctggcactggccacacttgggttccatcctggctttgccacttcccagctgtgtgaccgaagcaggttacttcactgcttggtgtcacagtttccccatttgcaaagagggataataatatgtgcaaccttgttactcagcagttactgagaggacaggttaagaacagggcctggcccacacctgatgctatctaagtatttccccgtgttatggtatctgctcgatgaacggccacttgtagggccactaggcctatgcattgttgagtgggagggcccgtgtcccatctcccccatggctccaggcctctctgaggagagctgaaggaggtggactgactagtccccgcacctccccgccactggctttccgggagacaggaggcagggtcctcagtgccatactactgaggctcagcggccaagctctggctggagccacggtgaggaaaggattagaaacccagatcccttgagccctgccaagtcctcactccctgggaggtgctgacaggaggcttgaggccaggcaggagcagcccatctggcccatcttctgccaccacccccaaccccaccgcaccgcacccttcccctccacgcttgccatgttttcctcagcaggacagatatttaatggtgactttgtggaccgaggctccttctctgtagaagtgatcctcacccttttcggcttcaagctcctgtacccagatcactttcacctccttcgaggtgagctgggaagtgacaaggtttgggttcattgtggggtcctgagtggggcactcactctgcaaggataatagttgcagctgtatttattttgtggactcggagatcatgcacagggcgaccttttaagattgagtatgtagtgcactgcacaaaagcatcacaccaaaggacgcgtttacatcatagatagtgtagaaatggatgtttactctgaccatttttcagcagatggcaaacaagggtgtgaggatgggccccttattctaatttgcacaagggcatgaaacaggctcctgggtggccctaaatctggcactaaagctgagtgactgagtgaacagaccagggctcgagggtgggagtaaggagactgttgacgaggcagttgtgccccctcagattcaggcttggtgtcagatttgggttctcttgattgaagtagagcccggagctgagtgtgctggttcacacctgtaatcccagcactttggaaggcccaggtaggaggatcacttcagcccaggagtttgagaccagcctgggcaacacagtgagactttgtctccagtaaacattttttaaaaaggccaggcgcagtggctcatgcctgtaatcccagcattttgggaggccaaggcaggtggatcatctgaggtcaagagttcgaaaccagcctgtccaatgtggtgaaaccccgtctctactaaaaatacaaaaattagccgggcatggtggtacacgcctgtaatcccagctgcctgggaggctgaggcaggagaatcgcttgaacccaggaggcacatgttgcaatgagccgagattgcgccactgcactccagcctagtcgatagagtgagactcagtctaaaaaaaaaaaaaaaagccaggcatggtggcaccgtgcacccgtagtcccagcttcttgggtggccaaagtggaaggattgcttgagcccaggagtgtaaggctgcagtgagccatgatcacaccgctgcactccagcgtgggcaacagagcaagaccctgtctctttgaaaaaaaaaaaaaaagtaagaaacttggaagtagagcccagagtatttgctggaggaacagacacaggtgtgagacaaagagggaacgaaaggggccctctagggttttggccggagtatctggagggctatggctgccagtgacgaagacgggaacatgtagagcagggtgtggccaggagctgaggagctcccctttggatgtggctgagactcaggagacatgggatgtgggtggggttccaaggggtgttgaaaatgtaggtttcttggtgtccagatgagattagacaagaggagctcactgggatgtgagggccacacaggggaggccctgcccatggcggggccggggtgagttgggaggtgagtgataggctggggcgaagcctgcatgcccgtgtccctgggctcacagggttcacgcagcagtgtccagcacagggtcaaagctcaggaagcccgactgtgggcctcgttgcaggaggcaacaagtgctcaggccgagaagtcagacaagcagagtctgagcagatgcgagactgggcagccttctccttgcccccaagctctggaagggaagaaggaggccgggtgcttgtgtctgagacagaaggatggagctcagggtggggtgggctggggcacatgttctgtagatgggcctactttttggttttgagacggtcttgctttgctctgttgcccaggctggagtgcagtagcatgagcatagctcactgcagcctctgcttcgtgggctcaagtgatcctctggcctcagcctcccaagtagctggcactataggcacgcaccaccatgcccagctaatttttaaaattgttttatagagaggtctcagtatattgcccaggctggtctcaaattgctgggctcaagcagttctgccttggcttcccaaagtgctggaattataggcgtgagccatggtgcttagccatggacctactttttgtcaagattccccccttggtacctccagtctggaaggcaccgcagtggcaagtgcgaggcccatgggggcaagggacgcatgcacagttctgggccttgagggtgccaggctggaggacactgatgtacctggaggctgagctttctcttctgtccccgtgttggccaggcaaccacgagacagacaacatgaaccagatctacggtttcgagggtgaggtgaaggccaagtacacagcccagatgtacgagctctttagcgaggtgttcgagtggctcccgttggcccagtgcatcaacggcaaagtgctggtgaggacggcgcgagccctgagtgtgggttccccacccagccacacctgggcagatgtgctggtgaaggaagttggggcctgtgggtgggtggcaccttccctcacagcggcatcccccatctccccagatcatgcacggaggcctgttcagtgaagacggtgtcaccctggatgacatccggaaaattgagcggaatcgacaacccccagattcaggtgagcagcgcggggccaggtgtctccagcagaaaggggcagcctgggctgagctctcccctgcaacccagccctgcctcggaggatgggctttgtgcccttggcaagaaacagcgggtctgagcctcagtttcctcacctgcgacttgggccagtgcacctccttcatggggctgtgatggcaagcacggtcgtgaccatggtgcggggtgaaggcacggtgaccgccgagcacacctgtccttatttatttgtgagttcagctgtggaaccctggaaggaggggaggtcttggggctcctgtgctagtgacgggcacacttcagagagttcacccacaggtgcacacgcacgtgcacactgtgagtgctgcagaggacatggattgggtgggctggtgctgggtgctcaggaaggcctctccagggaggcgaggtttgagctgacactgcgggaagcagaggcatctgccgtgcacagagcctggcgagcatattccaggcttgaggaggggtcctaaggcagggagaagttggcgagtgggcagggctgtgctttgagggctgacattggacatggggttcactgggcccaaatcctatggcgctttacaggccccagtgaggaactttgttcctagggcagtgcggagccaccaaaggctttgagtgggagaggggcctgatctgaatagtgacattgaaagctctatctggcttcggggccacaggggattgaatggggtctggagggcagatcagcagagagggtgggggtggctcagaatcacagtcacctgtcctgaatgtccatgtccatgctggatgtcccctgcccaacacccacccaggctgggctgtggggtcagcacctggccgggccaggaggtggcctgtgagtgaccacccccggggaggtggacgagtccctaatgtttccctcgctccccaccagggcccatgtgtgacctgctctggtcagatccacagccacaggtgagtctagggtggggtgcagggccggcgggtgtgggctgtggcagcaggtggaggcagacagtcaccctgaacccctgtctctcccttctgcccaccctcagaacgggcgctcgatcagcaagcggggcgtgagctgtcagtttgggcctgacgtcaccaaggccttcttggaagagaacaacctggactatatcatccgcagccacgaagtcaaggccgagggctacgaggtggctcacggaggccgctgtgtcaccgtcttctctgcccccaactactggtatgtctttgcctttccagcccagggcctctaccaagccacgggtttttgtcttggtttttgttttgcctttttatgatggaacatttcaaagacaggcaagagcagataaaagaacatgacgaacacccccgtatgtgtcacccacccatgcagcaccagtggggccagcctgtgagtgctgaccagctgccctgtgttacagcaagcccctggcacttcacctttctcccactgattgcccagcacttttcagaaggaaagggatctttttcttaaccacaatatcgtgtttacacttttgagtgctggctgggcatggtggctcacgcctataatcccagcactttgggaggccgaggtgggcggatcacctgaggtcaggagtttgagaccagcctggccaacatggtgaaaccccatctctactaaaaatacaaaaattagcagggcgtggtggcacacacccgtaatcccagctactcaggaggctgagtcaggagaattgttcgaacccgggaggtagaggttgcagtgagctgagattgcaccactgcactccagcctggggaagagtaagactccatctcaaaacacacgcacacgggcaagagtaagactccatctcaaaacacacacacacacacacacacacacacacacacacacacacacacacacacacacacacacacacacacacacacacacacacacacacacacacacagtgttgatcccttgcccccacccgaatcctgccaagttctctttctcctggtctctcctaagtgtcttttccagctgacttcttccagacaggacctaaacaaggaccacattttcagtctctttgcctgtgagttccctgtctctccccacccgcatcatttatttgttgaagaataggttgctgcctgctgtacgagtcacctgtgtcctggactaggctgactgcatccccgtggtgccgtgtgacatgttcctctgttccctgcatctctgggtgggcaaagctagaagcgtggtcagattcctagtggggtctggcgagcatccacctccatgagctatgccctgccccttcctgctcctgcttcctgcactcccaccctcttttccccatccccatcctcctgcccctcccattctttcccctggattcgtctttcccatctctgtctctctgtccatctgtgtctgttgtggctctgtccctccctctccctctgtcccttcttgcccagccattccttctcttaacccaccagccccacccagccctgaccacactgtccactctgctcctgtccctgcagcgaccagatggggaacaaagcctcctacatccacctccagggctctgacctacggcctcagttccaccagttcacagcagtggtgagtcacccctcagggcccctgccccttccatcccggcctggggacaaggaggctgagaccctggtaaggggcaggggtaggttctgccggtgggtgctcaggggctctgttctgacttctgtccatcccacctgccctggtcccacagcctcatcccaacgtcaagcccatggcctatgccaacacgctgctgcagctaggaatgatgtgaggtgacgggcggggcggcctgcatcccagggcccctccaatcccaccggacccaggccctgggctaggggcagagcaggccccgccccagggcaatgttggacccccttttactttgtaaagtttgtatttattcccctttaggtttgcagagggggtaggggcagagtcaggggctggccagagggtctgctccctggacagagaggaaggaggtggagcagctggggctgggggcacagcctgggcattctgtggggaggccgtcctcggggtggggtggggccgagtggctgccctgcccccctcatttgcatggctcctcccccactcaagcaatagggccccgccataggaagacccccagagagagggtcagcaggggggccccgcctgcgcctcccctcctatagccccatggtggggctaggctggggctcacccccctccccagctattttatgtctgtaattaaatatgttaaaataaagtcattatcggaagtcagcttgtctctggatggtggagccgaaggagctgcccgggttgggttacgcctgctcaggagatccggagggtggggaggccgcaaagtcccgctggccgggcccacccagctctgggctgaccgcccaagtggcctctgcctctgcccagcaccgtgggctcctggggagagttctgccccctgggtggggcgatgaggccagcactgagtggagcggagcggaagctgaggcatagcctcatcctttgctggctccagcaacaagcatgacagtgccgctccctgctccctgctcagggtaggcccagcagtggttcttgacatcacacgatgaggcgcgcatctcccgtcatccagggagaccagaggacccttgtctcactcccagttggctcttagtcacaggtaacgttggattccattcaggctgccctgccaggccttgaccctccagagagattgtgttttcaagtttgagctcctctggactcagctttctccagtggtatgtggcactgggggatggtctacagcaaatgactcctgcagggccgagtccgggagtgtttggccctttggagacctcccaggcagacatgaggcgtccgcggtcctgattgcgcgtaggcgctggggaggtgttctctaaggcccatcagccttacagtaagtgcaccgccttctggggtcaggtgcgccacggtccagaagccaagtacacatggcttcaggaaaacaggcacgaggcccaggttgccagtgccattcatttctcctgggaaagacaaaaacagccaccatgactgtcgggagggtgcttcagacctgatgggagtcagccaggcgggcagctgtgaggctctcagactcactgggtgtcggggttccctgccgctgcagttcaggaggtctcccaggacccggtatggtcattatcctcacagtgagggcctattatagcaagaatatggggatgagaatgagaggagggaagaggcaggcgcaagcgtcccactgccctctcccgtggagctgtgtggacagcgcttattttccccgcatggatgcgacagcgtgctggagtgtggccacctagggaagctcacccgggcctctgcatccaaggttttcttcaggggttggtcatggggactgctcaccccgcgtggctgaccgtagcctccagagagacccacggcccccaccctaaatcacatccttagcatagactgtccactgtggcccagggccccagataaagagacgctcctatgaggtaggacacaccgagggctctccggtgacctcccaggagccagccttttcttccgtcagggctgcagccatgctgcacagctgcataacaaacaccctaaccccccccaccccctcagcttcaacaacgaatgccttgctgtcttcctcagttctgtgattggctgggcttggccgtgcagggcgcacctgagggctgaggcatttgtggtcgggggcatttggggctggaggcatctgaagactcgcccggctggactccgtgggggctcactcccgtgacggcagttgctgtgggctgttagctgggctggcactggaacgcctgcgtgtggcttccatgtggcctgagcttctctcaacgtggcagcagggtccctcaagggagcattaaatgtttatatttaagtcaaccaactgcattccagctgtagctcttgcctcagcaatgtcctgccacacattcaattgtctctttcatttccttcaatctggaacatttcctcagccccgctttgtctttgacatggacgtttgtgatgatcacgttcctcccgctccccgtgtctgaagagtgctccctgactggctgccgtctcctccctgtcgggtctggctgggttctccagagggagtgctgcggaggggacacagcagaggccccatgctcgtgatgtatgttgcagatcattttcccccattctgtccttttttgttaaattgtggtaaaaagcacataacataaactgtaccaccttaaccatttgaaagtatatatcccagactgtcttttatctttagacttcacttgtggtttgttgccacagtacaagtttatttttatgaagccaaatgtatcagtatttctttaattgtgctggcgtgggagtcagtacttctccctacacccgggtttcagggaagttccctcgggtttcttctggtttttgtacagttttcttctttatgtcaagatctccagtctatttggagttccttcttgtatgtgatgtgaggaatggatctaattttatctttttccaagtggatattggaggaagtttttaaacgagaagagaaattcagaagatgctgcaagagatgggacctttacggcgatcaatgtctcagtaaagtcagaacaaagagactcaggcacacccaccacaagtaccaaaactttgagcagatcaacgccacagagctgggctcgggaaaacggaagggccatgggagggagggaaagcatttaatgggggaaggtctgggtaagccgataagttttggggaatcaagggggataaatacacgtgagtagggctctgaagttagaggcaatgaattgaccaaaaagaaacagtaacttccaaaagggagtgtgacggagagatgcccatagacgcaggtgatgaacatccagggctggccgggcacgggggctcacgcctgtgatcccagcacttggggaggccgagtcatgtggatcgcttgagcacaggagtctgctaaaataggggacaccactctagttacagtttggatcagggtcatcacgctggggacgtgccaggcacacggaggtgggggagatgctgggggctgggggcaggtgtggacactaagcaatggtgtcagaggctgctggggagtctcagggtctggcaggagcagatgtggactcccaggagtcatggacatgaattaggggtcctaagaagcctcgccactgacaaaggaagctgtgaagggaagaccagagaaccggggggagcgggggtcttaggtgctccccaccccatcgaccaggatggacccaggcatctgcccagctggatggaacagagactccaaggcaggaaggacccgagttctgtctccctgtcgttctcttggaccctttcacgctgtctttccccacccccatctgtcaatggccatgattagatcacagacccaagctctggccaccagggaaggcagaaagatgacctaacctccatagcaccgggtggggcccctgcctcccacctgtggggggtgtcagttgcttggcagccagagggacagaggccaccacccctcccctcccggccagcaccacagatggagaaactgggcccatggttccctctgcccacaccctcccatggctctcatctccgtggtccagcggatggggggaaacaggttgaggaatttggacactggaaaatgggtggaagcagttaaaacctgaggggaccaggaggggcagggtgggcacccatctcagatgagtcgaagagcagcagggtgattttccatgcccggccccttggctctgttctaagagtttacacgcattaacatttcattctaactcagtgagtcagacacttttcagatgcccattttacagataagcaagataagaagtacagagaggttaagttacatgctcagagtcacacagccagcaaatggcagaacgggacttgagcaccagctgactggctgcagagtctgtgccctgagccagtttgcagtagcattgagcactttatgtgtcaggcagtttacaggcactttgggtcctcgcaacagccccattttacagatgaggaaactgaggcacagaagcagcaatatacctgaggacacacaactaggaaggaggatagagcatattcggtgggagataataaaacctttgatgccaaatgctaaaataatatttggggaaaagcttttgaccccttttagcaaacaaaaattttatgatggcaagaatttatcctgctggttaatctgatttttccctttttagtacatgggtgttccctaaccttacccctgaagagaaaactcatgacttcccccagagctgtgcattctcaaagctttttttttttttttttttttttttttcctgagatggagtcttgctctgtcgcccaggttggagtgcagtggcgcaatctcgctcactgaagcctcccctccccctcctgggttcaagcctcgtaagtagctgggattacaggcgtgtgccaccacgcccagctaatttttgtatttttagtagagacggggtttccccatgttagtcaggctggtctcgaactcctgacctcaagtgatctgcccgcctcggctgcccaaagtgctgggattacaggtgtgagccactgcgcccggcctcaaagcatttttgttagcggtctttttaagatttctccaccgggtgtggtggctcacgcctgtaatctcagcattttgggaggccgcggcgggcagatcacgaggtcaggagtgtaacaccagcctggccaacatggtgaaaccccgtctccactaaaaatacaaaaaaattagccgggcatggtggcacgtgcctgtaatcccagctactcaggaggctgaggcaggagaattgcttgaaccaggacccaggaggcggaggttgcagtgagccgagatggcgccactgtattccagcctgggctacagagcgggactccgtctcaaaaaaaaaaaaaaaaaaaaaaaaaaaatttctcttgtaactgttctgtgattgtccactgtatggcgctagggggcgctgtaacaccacggtgttttatagtcattacaacactcttccagcagatggcggcaaagtgttggggaaagagggtgcctttttgccaatccccatatatttttctaattttctttgtatggtatgcaaacatttccaatgctcaaaatttggtctcagctaccattctaactatttgaggcttacgcttctctgtttcccctccaatctgggccgaagtcttcctgtcagtgaaacagggatgtttaaaggagtttttttggggcccctttcccagagctgtcctgatggcccatttggggcagtttctctctttttggagcgtggagctgctcttaaggccctgcctgctggattctcaaatagcatggtggacactcccctccagacctcctctgtgggcccagcctcccctctcttagccccttggagttcctgccccttttgggccccaaagtcctgtctctaactcaaagacagttagttatctgtgttaaaataaaataacatgggccgggcgtggtggctcacgcctgtaatcccagcactttgggaggccgaggtgggcggatgacctgaggtcaggagttcgagaccagcctggccaacatggtgagacccgatctctactaaaattgtcaaagaacaaattaaggtgtggtggcgggtgcctgtaatctcagttactcgggaggctgaagcaggagaattgcttgaacccgggaggtggaggttgcagtgatcggagatcgtgccagcctgggtgacagagcaagactccatctcaaaaaataaataattttttaaaaatggagaccaggactgagaattccccaaagcagacaaaagcagttaggccatgtaaacacaacttaatctagtttgacttctgaatgtgagtgaaacttagcttattccctgtaaataaatgctgctgagaatcataaacaaagctgaaatcgccttccaaaaggatgtaagacaatcacttttaaccgatcccttgtcatatggaagcccccaccatcatagtcggtcatcgtgaaggtgaagccacctcctggtttttgcttttttttttttttttttttttttgagatggagtctcgctctgtcgcccaggttggagtgcagtggtgcgatcttggctcactgcaagctccgcctcccgggttcacgccattctcctgcctcagcctcccgagtagctgggactacaggtgcccgccaccacgcctgactaatgttttgtatttttagtagagacaaggtttcactgtgttacccaggatggtctcgatctcctgacctcatgatccacccgccttggtctcccaaagtgctaggattacaggcgtgagccaccgcgcctggccttttttttttttttttttttttttttgagatggagtctcactcttgtcgcccaggctggagtgcagtggtgcaatctccattcactgcaacctctgcctcctgggttcaagcgattctcctgcctcagcctcctgagtagctgggactacaggcacccgccaccatgcctggctaattttgtgtatttttagtagagatggggtttcactatgttggctaggctagtctcgaactcctgacctcgtgatctgcctggctcggcctcccagagtgctgggattacaggcgtgagccactgtgcccggctggtttttgctttctaagccatcctacaccagcctgcctctgagttgcttaccgctcagattgaagtctcctggatgacaattcgtgctttttgcatgacaataaacttttttttcccccccctaattggagcctattttattctggacattttgggggaattagaagtgagattcaaagaagatcccaaggagccctgactgcagggagtaaccaggcatgggcacccacacagccagctgtgttcactactttcttgctaaccaaggggtttgggataagtctttttcggatctgagcttccttctcttcacctttgagctctccgtttgtcacacaaaaggggccgattctgtttgtttctatttgtctgtctgagtttgagctcgggtaagtcattctttcctgttcaataatggaggaggatctgtgtttccctgcatcctagaatggtaaccccctggctagacaccccatagcttatttggcagagtctcagaggaaacgaaggccagggtgcattcagaacatcccagtattctccatctagaactctacctgcttatatgtttaagaactatggccgggcgcggtggctcacacctgtaatcccagcattttgggaggccaaggcagggcggatcacttgaggtcaggagttcaagaccagcctggccaatatggcgaaaccccatctctactaagaatacaaaaattagccgggcatggtggcaggaacctgtaatcccagctattccagaggctgaggcaggagaatctcttgaacccaggaggtggagattgcagtaagccgagatcgtgcctctgcactgcactccagcctggcaatacaccgagactccatctcaaattcccagtgtcagccaggcacagtggctcatgcctgtaatcccagcactttgggatgccaaggcagggcggatcacttgaggtcaggagttcaagaccagcctggccaatatggcgaaaccccatctccactaaaaatacaaaaattagccgggcatggtggtgggagcctgtaatcccggctactccagaggctgaggcaggagaatctcttgaacccaggaggcggaggttgcagtgagctgagatcgcatcactgcattccagcctgggcaacagccaaaatactgtctcaaaaaaaaaaaaatagatagatagatagatagatagatagatagatagatacatacatacatacatacatacatacatacatagatttttatggatctctctgagatccctgacactgtatgggcctcttcttccacagatgtgggcaaaataaaaaatgctgaacctatgaaaattcagattaatctttcaaaaccactgttgaagttgtctcagtacccgctttacaaaaagccatacatgtgcaaactcctacaacagaagatttaatgaaacgggctatttcttgtaatgttcctatcctgttttaaaaaatgtacagatgaggatggatatttgtacaagatctcgatctccatgggatctttactacacccataaataaaacatttaaaaatgtcccgtatacatatgtaacaaacctgcacgttgtgcacatgtaccctaaaacttaaagtataatttaaaaaaagtcccatagtgcccaaccccaacaccctattgatgaaggtgccaaatgattccaaatcgaatggttcacaggagtggacatatgctgtctgtggttttttttttttgttttttttttttccccagacagagtctcactctgtcgcccaggctggagtgcagtggcgggatctcggctcactgcaacctccgcctcccgggttcaagcaattctcctgcctcaccctcccgagtagctgggattacaggcgtgcgccaccgcgcctggccccaacctgcattttcattggttgcagggataaaaggcaagtcccaccagaaaatcaatgccaaccaggaactgagggtggcggtgttcagtctgttcccagggttttgagaactggtgcagtgcctaacaagcacacacgttccccttagtaaggaaatacggttaagaatgaagtaaaaaaaaaattgttttctttcaatttatgtgtctatatattttcattttttatgttaataaagacaaggtctcgctatgttgcccaggctgatctcaaactccttagctctacatattttcaaatggctactaacttcttaggacataagagcttaggttgtttagacctcaccagatgagaatggaactgttaggtatttctttgggggcgctatggaaaaaatgactgaattactaaggtctggtgcaccaagcaagtccagagccacctgcaccagggcacaggggttgagagcctgggctctggagtcagaagacctaggtttgccacctcactttgccatccttgggcattgtgcgacctctgcgcctgtaaaacgggaatagttaacagttgtgggattagtgacaaagcccatagaaaacattcagacaggccgggcgtggtggcgggcgcctgtagtcccagctactcgggaggctgaggcaggagaatggcgtgaacccgggaggcggagcttgcagtgagccgagatcgtgccactgcactccagcctgggcgacagagcgagactccctctcaaaaacaaacgaacaaaaacattcagacaatccctggcatgtcttagcaggcgataaatgttagttttataaatttatttatttaaccaaaatggactcattctacatatgtatttctatcatttttttccttattattatctggacatttttttctaggcaggcctgtaaggatctttctttctttctcttgccttccttcttttttttcttttttcttttttttttttttttttttttttgagacagggtcttgctctgtcactcgggttggagtgcagtagcacgatctcagctaactgcagcctccatctcctgggctcaagctatctcctcccacctcagcctcctgaatagctgggaacacatgccaccacgcccgactaattttttgtagagacagggtttcaccatgttgcccagtcttttctcactcctgagctcaagccatcctcctgcctcagcctcccaaagtgctggaattataggcatgagccactgcgcctgggcaactgttctttctaatagccccctagtctgcatccttcagggacttcttaaagtaaaaacgtccagccaggcgcagtggctcacgcctgtaatcccagcactttgggaggccgaggtgggtggatcacgaggtcaggagatcaagaccaccctggccaatatggtgaaaccccgtctctactaaaaatacaaaaattagccgggcatggtgacacgtgcctgtaatctcagctactcggaggctgaggcaagagaatcactggaaccagggagctggaggttgcagtgagctgagattgcaccactgcactccaacctggtgacagagcgagactccgtctcaaaaaaaaaaaaaaaaaaagaaaaaagaactccaagacttcaaggttcccctgaagcttggatgcaaacgtaaagcctgacctatcctcattgataaataggcccttattctcccttcccttccattacttccctccttctcataggaaggcattccatttcttcatcctgccatttgaggcctctgcctctgtgtcctgccctggctaaggcccctgcctctgtctccaccatgccttgtgaccctggagaggtccctcaattccttaagccacaggttcctcatctatataatggggatgataataatagaagctgcatccctgggctgctgtgagaattacagagttcaacccccaaggctatgacgaatctgcccgtagtaaagagtgaggctgggggcggtggctcacccctgtaatcccagcactttgggaggccaaggcaggtggatcacttgagatcaggagttcaagaccagccaggccaacatggtgaaaccccgtctctactaaaaatacaaaaattagccaggtgtggtggcaggagcctgtaatcccagccattagggaggccgagggcagaagaatcgcttgagcccgggaggcaaaggttgcagtgaaccgagatcgcttcactgccctccagcctgggtgacaaagcgagactccttctcaaaaacaaacaaacaaaaaaccaaactgttcccctgaacttgtttttttgtggcagcgggtggcagctgggcctgtcagatagaggctgatttggaatcaagacatcggtcttttggggcaaccgttcagattctgtgagtttgaaaccacaaatgccaaagtttaaattgggagactggaccctgcaggcactatttaaatccctttttgtgttacaaatagtgaaccccccctgctgccatctgcaggccactaaagtgtccattccacatctgagtcctgggcgattctgaagtgggatcccgaggacagagatactaataagttggctcacgcctgtaatcgcagcactttgggaggccgaggcacgcagatcacgaggtcaggagttcgagaccagcctggccaacatggtgaaacctcgtctctactaaaaatacaaaaaattagctgggtgaggtggcgggagcctgtaatcccagctactcaggaggctgaggtaggagaatcacttgaaaccagaaggcggaggttgcagtgagctgagattgtgccactgcactccagcctgggcgacagagcgagactccgtcaagaaaggaagggaggaagggaggaaggaaggaaggaagggagggagggaggaaggaaggaaggaagggaaaggaaggaaatgaaggaataagaaaaaagaaaataaaagcaaaggaaaagaaaagagaaaagaaaagaagaaagaaaaagttgtgtccattcccgagtcaaacttagactccggacctcttttcccagctgccgccagggggcgcaacgtggctcattgtctccaaaaaacagccgctgtcaattcttcccttccccgtatgcccctggtacctccccccgtcaagaggtgaagtctatttcccttccgcttgaatccagactagccttatgacttggtttgaccaagaagttgagtcccatcgaatgactcctcttctcttcaaatcctcttatggcttcctatgtcactaaaggtcaaagccagagtccttataacagggtctggacctgttcagtgcagcagccactactgacatggggatattttaatttcaatgtaactaaatacaattaaacatccacatcctgaagtcacagtagctacatcgcaagtgctcaagagccacacgtggccagtggctaccacatcacgcagtgctggtgcaggacactgccaccatcgcacgcagttctcttgcacagctcaggtctacacactccgcctccatctcaccccctgccttgtttcccacctccctctctgtgtctccccccgtggcttcagccacccaggtctccgggtcacaccaggcatattcctgcctcagggcctttgcactgctgttctctttcttcaaatgtcacattcccagggagggcttccctgaccacctataaaaatgtaacccaggctgggcgcagtggctcacccctgtaatcccagcactttgggaggctgaagcgggcggatcacctgaggttggaagttcaagaccagcctgaacaacacggagaaaccccgtctctactaaaaatataaaattagccgggcgtggtggtgcatgcctgtaatcccagctactcagaaggctgaagcaggagaatcgcttgaatccagaaggtggagattgcggtgagcggagatcgcggtgagcggagatcgcgccactgcactccagcctgggcaacaagagcgaaactgcatctcaaaaacaaacaaacaaacaaaccctagcctggctcggtggctcacgcctgtaatcccagcactttgggaggccgaggcgggtggatcacttaaggtcaggagttcgagaccagcctggccaacatggagaaactccgtctctattaaaatacacaaaaattagccacgcgtggtggcgcgcgcctgtaatcccagctactcgggaggctgaggcacgagaatcgcttgaacccgggaggcagaggggcagtgagctgagatcgtgccactgcactccagcctgggtgacagagcaagaccccgtctcaaaaagaaaaaaaaaaagtgaccttttctgcacttgctcgctttatttttcggagctctgattgccctggttcactcatttgtttctcaatagcacgccgacttgtcaggaaggttaatagaggaaattggtgacacagacattgcaatcaggaagggctgagagtagcaagtcaggtgggctcaccattagcaatgcagggagctgctgtctcgtgaggattggaggagccacgtggaaaatgctgctgcccggagcccaggtggctgcgctggccagggagaagcccctggttggcggcggtggccgtcactgctgctgctgcttctgcagccaccacggcccaagcatcccccagatggcgtccccttcctctggcttcctctcccgtagcaacagcagtccctgcagaggactctggagtggtggttgcggggtcctaccccgcagggggcaggtgggcgtggcggggagaggcagtagagtcgctcagggtcagctctgacctgtccccgcggtgttcccggccccagcagctgctcagttatttgtcgagtgctgacggtcggtcggaagaaaccacccggactgaggaaggctgaccccagatgcgcctagttgggaatgtgctggaaagatacgccccctggagggagtgcgcccaggaagtggggaggagcgtttgagatcgaaggagtggccgcgtaaaggccctgaggtctcgcaaggaagggtcccggggcgtcccaggccctgttctaggtgcaagaaacaggaacctcctggagcgagcatgcggtggggaggcagggggtacgcctcctacatgaggaggagatccacgcattaggaagtgaggcctgctggggacaaaagtctggcaggcagggccccaggagggccggggcaggagagggtttgcagtcatcgtaaacggggcggcatggaaagccctcactgagaaggtgccaaagaccccaaggaggtgaggggttgcggccggcagatgcctggggaaagcgcatgaccggaagcgcaggaagagccaggttaaaagccccaagccagagtgtgataatatggggctgttaatgtgtgactactgcccctcccgtgccaggctcggtgctggcgtaggggaggcagtggggccaaagaaggccacctgcctccatggtggtcgctgtcgggttggatttccacgtgcctggagtttaaaagtgaggcagcctggaaatgagcttgcagagttcgctgggggcgtgggggaggtttggccgtgcagactttcagatagcgggcccaggcagggacctcgatcctgaacccgcccccaccccgatcccggagccagctcagacacaggggcgcctgaaaactcctagggacatgaccaggtgctggagggagggagaagtctgggttccggggacagaaaaagacagtccctaccgccaacgggttccccagacccggtttccactgaggccccaccttccccagcgcagtcttcgccccttgcataggaggccacatctcctacacgtagatatgcagagagcgtgtcaacgcgcaagagctgcagcgccccatttaaccaccaagaggctccagggccgctggttaaaatcgtgcgggaagagatagcttgacgccaggagttcaagaccggcccgagcaaaatagtgacccacccccaacccccgctccccgcctctcgtctatacaaaaataaatatacataaataaaataaaataagcaaataaatattacatcgtgccggcgatggtgtttcccgagcactcgaagcgcctaagttttccctggcctttgaacgctagactgcagaaagcggcaggacagcggttctcaaagtcaggttctggaccagctgcgccaacgtctcctgggaactagatacacatgttcgggcccacccgagacctacagaacccctttgggcaggcagcccggcaagctgaattttcgaaggaccccccaggcacctgcgatacgggaccagttggagaaacggtccggcatcacagtttgagaccccagatgtggggtctgatggtctctaggacccctagggtcacagttgtcagccccggctgcccattgctgggaatcacctgggaagctttagggactgttgctgccccagcggaggcctggcaccatcccgagattcccagagtgggtcctgtgtgcatgctggacatgggctccgggtcatttcagggacagccggggcggggactgctgccctggggtctctgtcaaggccgatgtgtgcagtgaaaaactggccgctgctgatacctagcaggaataagacgagatgacgtctcctagggttgattggagcacgaacacatcacacccttttcagtaccctgagcaatgctggaaggaaagctctgctatgatccccctttcccatgaggacatggagtcacagagaggtcaagttaccagcccaaggtcacacagcttgcaaggagcggtgctgggggagccaggcagctgagctccaaattgctctcctgtcacaccctgtgggcctgggagggagacccacaaatcagaaatccttccacccccatgtctttttttttttttttttttttgacagaatctcgctctgtcacctaggctggagtgcagtggtgcaatctcggctcactgcaacctccgcctcctgggttcaaacaattctcatgcctcagcctcccaagtagctgggattacaagcacctgccatcacgtccagctaatttttgtatttacagtagagacggatttttgccatgttggccaggctggtctcaaactcctgacctcaagtgatctgcccatctcgaccccccaaagtgttggaattataggcgtgagacactgtacgcagcccctccacccccatgtctcagggtggcatccctcccttccatgtctgtgttctggaatcacctgtggcctcttattttcctctttggtaaaaatgaggagcagctgggtcgggcacggtggctcacgcctgtaatcccagtactttgggaggccgaggcgggcggatcacgaggtcaggagatcaagaccatcctaacacagtgaaaccccatctctactaaaaatacaaaaaaattagctgggcgtgatggagggtgcctgtagtcccagctactagggaggctgaggcaggagaatggcgtgaacccagcaggcggagtttgcagtaagccgagatcgcgccactgcactccagcctgggtgacagagcgagactctgtcacaaaaacaaacaaacaaacaaacaaacaaacaatgaggagcagctggactggtccagatgaaggctgattcagagaccaatctctggtttcctgggcttcctcttggaaaccttcgtgcatttgaaaccacaccccagaggcatcaagggactgactggccctgcaggtgctgtttgaaggcccctgcgctgaaatataatagcgaacactctgttctgtctcagttactagagggctcccctacctgtggggcctccctgaatgctcacggtggggatgctgggaacagttcagaaaaggttgtgttcactcggggggcaacaaattttgactcagtgggggatagacttgcccaaagcctcagggccacccagaaaggctatgcaaataagacccagggatggccgggtatacaagtaagactgggggggctgaggcacgagaattgcttgaacccgggaggcagaggttgcagtgagttgagatcccaccactgcactccagcctggttgacagagactctgcctaaaaacaaaaacaaaaacaaacaaaaaaacccagggagacggtgtgaaactgtttcttttttcttttttgagacagggttttgcttgttgcccaggttggagtacaatagcgcaatctcagctcgccgcaacctcctgggttcaactgatcctcctcctacctcagcctcccgagtagctgggattacaggcatgcaccatcatgcccagctaattttttgtatttttagtacagatggggtttcaccatgttggccaggctggtctcgaactcctgacttcaggtgatccacccacctcggcctcccaaaatgctgggattacaggcgtgagccaccgcgcccggctgtgaaactttctgcaagcatctgtgtgtctgtgactgcctggcttttgagtttgtgtgataacatgtgagtgtgtccatctggctgagggaatcaaagtgtccaacggcatctagcagtgtgtgacgggtcctgagtgggtgaacacgttgacatttccaagtatgtcagtgtttgtatgaatgggtctgtgaatgtgtgggggttggcttcccggagcacagtgggtctgtgcgcctctgtgagtacacgtgtgtgtactacatgtgtgtgtccgtgtctgtgtctatgtatgggcagattaatcataatttctgttggtgaatgtgggtctgccagtggtgcctgagtgtacatgtgtctgtggtatgtgctgtgcctgcgtgcctggatccgagtgtgcatgtgtctatgtgtgtgtccacacgtgtatggcagtgagagagactgacccagtgttgcctgatgtctgtgaaatccacgcagctcctcgtttaactccatcttgccacttgtttggggtccacaccactttccttctcatgggcccctgatgttcccccgagacccccccccccccatagctctgggcgctgcagggaggaggagcagagagactcgctctgagccttcatttcctgcattcatgccgtcggctcctccagtctccgaatccctccaaacatctgtctctgctgttcctttttaccttccagctcctcaggcaggccaggtccccatggtcacgagacctctgccctccgaagtgggcagcgacaaaggacagcctccctccccaccaaccagaaccttcccacccagcctgtcttcctccgcgcacctgcaaagcctcccctccaggtgaggtccacagcttgtatttcttccaaacctcccagggcctcgttcttgctgtgagccgtggactacacggccaagtatccaccagcatgcacaaagcggctctagcaaggccatgcggcgcgccaggcagcaagcagcaccagcagtaaccactccactcagaaaagagcaggggtggggcgcggtggctcactcccatagtcccagagctgaggccagaggatcgcttgatcccaagagtgcaagtgagccgtgattgcaacaccacactccagcctgggtgacagagccagaccctgtcttgaaagaaagaaaagagtaaagaaaagagagaaagagaaaggaaagaaagcaagagagagagagaaagagagagggagggagggaggaagaaagaaagagggaaggaaggaaggaaggaaaggagggagggtgggagggggaaggggagggagagggagaggggagggagagagggagaggggaggggagtggagggagagagggagaggggaggggagtggagggagagagggagaggggaggggagggagggaaggggaggggagggagggaaggagggaggagggtggaagagagaaaaacaaaaggagggtggtgggatagaattctttactttcctgaggaaaaaaataagaaacttaggccaggcctgcaaccagttaggaagacagactggcctttggacctccacgaactctcttttctcctgccctcagcaaggctagagtgtggtcatttgctgtttttcactgctaggggttgtggggacacaaggcaatacaggcccccagcttcctcctaacctccacagggctttagcaacccagtttcttcccaattataggaagcagttggccgcgtgcagtggctcatgcctgtaatcccagcactttgggaagcagaggtgggcagatcagctgaggttaggagttcaagacaagcttggccaatatggtgaaacctcatctctactaaaaatacaaaaattagccaggtgtggtggcacacacctgtagtcccagctattcgggaggctgagggaggagaatcgcttgaaccagggaggcggagatggcagtgagccgagatcgtgccactgcactccagcctgggagacagagagtgagattccatctccaaaaagaaaaaaaaaaatgcagcagcaattaatgcacaatacacacagcctctttttttttttttttttttttttttttttgagacagagtctcactgtgtcactaggctggagtgcaatggcacaatctcggctcactgcaacctccacctcctgggttcaagagattctcttgcctcagcctccagagtagctgggactacaggcgtgcgccacaaggccagtctaatttttgtatttttattagagacggggtttcaccacgttggccaggatggtctcgatctcttgacctcgtgatccacccgccttggcctccctaagtgctgggattacaggcgtgagccaccatgcccggccaaccacagcccctcttttgggccttttcctattgcaatgatttttcaatgtgtccagtggccgagttgcccagatgtccgtggagcttgatgcaaacagaattcagagccacacaggcaccgctagcaaatccacacctctggtgccgagggccccagaatctgtgttttgaatgcatttttcagacgcttttactgtaccttataaccaagatcgggtgaggtgtgcaaaccaagggccctgtcccctccaaaccagcagagcccggggcatgaggatggcaagcgaagtgacaacataaacacaggtgtctccatcatcaaggatgggagtggaacggacagcaagggccaggtcacccccagagcattcgtcagttgtcaagtccaaagctaagaaatcagttcataaatgttttttgatttgcatgttggctcaactctttttaagtccaaggaggcagtccacattaagtgtgcaggcaaaaaagagatggaaaaaggagtcagtttctcccctgccctccctctctccctttatcaagctgagcaccttgagttgcatttgaggaaatgaaaactataggtgacgcaaccccattgtgtcgaattctttctttacattttttgggttgctacaaggaatcagtattttttttttttaatcagatggtgtgtgtggtggctcacatctgtaatcccagcattttgggaggccgaggcaggaggatcacttgaggccagaagtttgaggctgcagtgagttatgatcatgccactgcactccagcctgggcaacagagtgagaccctgtctctaaaaaatttaaaaaaaaatcaaagcatgaacaaaactttaacaagagaataaagagggttgttaggtggagacgtggccagcactccacctccactttgaagttcagaggcagagcatctctccctcccacacttggagggagggcccgtgggctgtctctagccctcacctcacagctggtcttcttgctctccctgctcagcttctgctctggcctcggccctcagcaccctgaggttcctggcctctcctgccctggggactctcttgggcagggttggcaaccggggagtgtgccagaaggctctccggcgcttgcaaaaccacgaaaagcgtccaggggtctggaacctcactgtcttgacctgtttccgggccctggctcctggagctgttcctgtggtcccttgggcagctgagacttcagcttcctggatacctggggcccctgccctctgattatgtgcagcctctgccctctggccagcccgggcctgtgccctctgattatctgcaccctggacagctggggccctttccctctggtcatgtacggcctcttccctttgattatctgtaacctctgacccctggtcagctggggcctccgccctctgattatctgcagcctcttccctgtggttatctgtgccctgtgacctctggtcagctggggcctctgccctctgattatctgcagcctcttccctctggttatctgcagcctctgccccctcctcagctggggcccctgccctctgattatctgcagcctcttccctctgattatctgcagcctctgccccctggtcagctggggcccctgccctctgattacctgcagccccttcccgctggtcagctatggcctcttccctttgactatctgcagcctctcccccctgatcagcctcgatgtctgccccctgacctgtgggtgctgtctgctccttcctgcggcgccgaaaggaggcccagttgatcttgggcctccatcgcctaggggaagcctggggcacacaaacatctcccgcgtttcccaagcgatcccccgggctggtgccctctggcgccgatgatacccctgcgctctccactgcggtggaggccagccgggcctcgcccaccccggggcccgccctcggcgcccaacccttcaccctccgcttcagcttcccccaggacacctggctgacatactcccgccacctgtccgctttggacagctgaggccccaggttgtcctcaaacatgggcactggcaggttgacgcggcggcgggcaggcggcgcgctgggctgcttctcctgtcgccggaggaaggcctcgaccagttcctcatcatcctcactctccaggtcgcttcccaggaacttgctgcccaggtagctgacgggcattttgcgcaccttcttgccccgccgcgggccctggcggctcttgtctctggaggtctcgaagtcgctgaactcgctgtcgctggcgttgctgctgtcgtacgtgcccacgaccagccggggcggaggagtcaccatctgctgcactctcctcctcactcggggctccttgggctttttggggggctggggcgggtgcggggtgctcttctccatgatgcgggccacgtcctccagggtgcggccctcttcttccaggaactgggtcagccgctcccgaaattctgcttccttggtggcgggcttagagatgactctccagacgcccccagccagcctgacctcccgggggatgagcaaatagtcgacgtcctccccgatctgcagcatccccaccgtggagtcctcctccttgcggaacaccttgccgatcttcttaaatgtccccacgggctttagggcttccacgaggacgtccaaatccacatctttgcagacatcggggacgctccaaagaatgaggcagtcgggggacggcaggaagccccaggggaaccagccccccacgtggcttttctcgagagtctttaagatctccagggtgatatctggggtgagggggcaatgagccccaacaaactactgtagcccttagtcttgagggagggactggatggggggagttccagcaacgctgaccggagagtctcacctccctagccagggacgagccaaacgcctccaatctcttcgcctgcaacaagtacagtcttgaccaagtccggctcccccaccaaggacttgggggaatcaatttccaggatgcctacgtgagccgggggcgaggtcagtcccaaggctcaaggcccactccaagctggaaacgtggtgtcccagctccaagttggggcgcgcgggctgccagcgactcttcctgccccaggccccagggacgcggctggaacttgggacaggacttcgcagacaaagacggtccagtcgaagctattcaatatggccgaggcgctgggaggccccagcccgggcctccagtagggtcccccgcccccaggcaggccgccacccagctccaggctgaccttgacgcgccgcagcctgccagcccgcgcgcttagagctctgcaccgtggagcgcgcgggcaggaagttcctcctcgccctccgccagaatgaggcccaccttcccccgtctcatcttacactcccagactctggaagactgacaggggggctgtccactcccttcggggcggcctccttcccctcccccacaggggtgtggccgcgccccgggcctagctgggcccattgcttcccagcgaagcggcagtggcccacgtcagcacctttcctgaaaggcagcggttcccaaacctgccatccgaaatgtgcaagtttccagccaagtccgggaggtgggtgtgctagtggattctactttttgagagccactggcaccacagattagcattttaaattcacgcgactatcggtacccgtacacctatatgcgtgggtagagaaatgggtacctgactgcaacagtcccactgtggcgcttggcaggtcagggctcaatacatatttttgaggggatgaataaacccaaatgttcatggccaggcgcggtggctcatgcctgtaatgccagcactttgggaggcccaggtgggtggaacacttgaggccaggagttcgagaccagcctgcccaacatggtgaaaccctcgtctctaccccgggtgtggtggtgcgcgtgcgtagtcccaagctacgcgagaggctgaggcaggagaatggcgtgaacctgggaggtggaggttgcagagatcgcgccactgcactccggcctgcgcaacagagggagactgtctcaaaaaaacaaaagtgcaaaaaaacccctacaaataaacaacaacaaaaaaccctaaaagttcacgagtagagactgcctctattttatggtagtatcttacagtgaaatattttgcaacttcgaaaaaagaatgagatggctaaggataggcacggtttatgaggcgcttcctatgtagtaggcaccattcccagtgctttctatgaatgaactcaggaaatccttgctataacaggagactggtagcatgagtacaattcccattagacagctgaggaaactgaggcccaaggacataaaaccacactctcaaggtcacagccatggggagtggttgagtttggatttgaatccagaatagtctgccttttgtgtcgaccaaagagtcaagatggccaggcgcggtggctcacgcctgtaatcccagccctttgggaggctgaggcgggcagatcacgaggtcaggagatcaagacaagaccatcctggctaacgcggtgaaaccctgtctctactaaaaatgcaaaaaaattagccgcgcgtggtggtacgtgcctgtagtcccagctactcgggaggctgaggcagaagaatctcttgaacccgggaggcggaggttgcagtgagccgcgatcgcaccactgcactccagcctggacgacagagcaagactccgtctcaaaaaaaaaaaaagaaagaaagaaagaaaaaaaagaatcaagatgtgaaccaatgctagtcgcattcggccgggagctcggttcttgagacgcgagtctaccgaagctcccgccagttgagaggcgagtctgccgaagctcccggccgaaaaagccaaatccttccttaacccagtgtctgaggggttttgtccgtggctcctcctgctacaggacatgcgactagcattggtccacatctttggaaccaggcatccagagacatgttgaataggcctcgttgttaggaaccctcagaggtacatggtaaggccagtgccatcaatcatctttttacagacggtgaaactgaggctggtctgaagttgcacagctctgagtggtggatctaatataatattagaaccagatcttgggcactagcatttaaaacactagctgacgctaaagacacagctaatccccttctcctaaatgtgttgcaccatttaaccacttagcagccacaatacttgcagccactcttgcctggatgtgtacaaagccccctcactgggcttcccgcctccccatcactgcttgcaatccaggccccatccagaagctgggggcatcttttaaaaacttaggtccgatctgtctctactcttttgaaaattctccatctcaggctgggcgccgtggctcacgcctttaatccagcactttgggaggctgaggcgggcggatcacctgaggtccggagtttgagaccagcctggtcaacatggcaaaaccccatctctactaaaaaatacaaaaattgccgggcgcggtggctcacgcttgtaatcccagcattttgggaggctgaagcgggtggatcacctgaggtcagaagtttgagaccagcctggccaacatggtgaaaccccgcctctactaaaactacaaaactagcctgtcttggtggcgcatgcctgtaatcccagctactccggaggctcaggcaggagaatcgtttgaatccgggattcagaggttgcagtgagctgagaccgtgccattgcactccagcctgggcaacaagagcgaaactccgtctcaaaaacaaacaaacaaaaaaaagaaacgaacaaaaatataagaattagccgggcatggtgacacatgcctgtaatcccagctactggggaggctgaggcagaagaatcgcttgaactgggaggcggaggttgcagtgagccaagatcgcgccactgccctccaccttgggcgacagagcgagactccgtctcaaataaataaataaatgtgatcttatttaactcataaaggaaccaggcaaatttttaaagagggaacggaggaaaaagagacgggccagagggaaagaaaagatgtgggggcttaggggacgttaaggtctcagcgagcggcctgttcacaattaccggcttattcaggttgtttttctcttgcagagccaggtcgttgggcttcgctggatttttctcctctttctccctggctcagtcccagccgccgcgctcagcccccgggcctcccgcggccccgcccctcgcctcccccttcgcacagtttgtggcctccgcagtccggcggtctccatggcaaccacgggacgcgctcctccgcgcggatcaaaactaagcgggtggggcggaggcggaggcgaggctgcagggagatggtgggggtgggggcgccacggaggacgagggcaggagctcctcttttctgcccctggtgcctcccttaggcctcatccccaaagccagcttccctgaaaagctgtttgtagaaaccaaaaaatgaaaaatcctaaggacacctaggtttcaggaatgctgattaaagaatcgcaagtctgagggctcatgacagtgccttccaagtggtgacctcgcagatgagacgtttgggttttgtagtcataaaagggctttcgttttgtttgtttgttttgttttttgtttgtttttctttttttatttggtgggggagcagggagcggcgcaaggaggataatctaagaaatgaaaatcccaaatgttccatatttttgcaaaaatcgtcaacctccggccgggggcggtgactcatgcctgtaatcccagcactttgggaagccaaggcaggaggatcgcttgagcccaggaattggagaccagcctgggcaacatagcgagactccggtctccacaaaaaatttaaaaattagccgaatattatggtgtgcgcctgtggtctgagctactcgggagactgaggtgggcctatcgcttgagcccgggaggtcagggctgcaggaagcggagatcgcccatctgcacgccagcctgggcaacagagcgagactccatctcaaaaaaaaaaaaaattgccagcccctgaacggttcagctgtgggtgtttttaattgcacagatctctggcaggtgagacccttctccagccatcacagaataaaataataaaaacgagaactgtagcctcacttttgcatttgtttaaaataaatggaaagttggaaaagaatggggaagagaaacaaaacacggctgaaatccctctacccagctacattttgttgccatttaaaaaaaaaatgggacacgcgggccaggggcagtggctcaagcttgtaatccaagcaatttgggaggcctacgcgggcgatcgcctgaagtcaggagttcgagaccagcctggccaatatgatgaaaccccaccgtctctactaaaagtacaaaaattagctgggcacgatggcaggcgcccgtaatctcagctactagggaggctgaggcaggagaatcgcttgaacctgggaggcacaggttgcagtgagctgaggtggtgccactgtactccagcttgggcaacagagtaacaccctgtctcaaaaaaggatacacggtcagaaaaagcaaaagttacagaaaggtaaatttttttcaaaaaaggattcttctccccaaaccccaccttccagcctctccccaaaaagtaaccagttaaatatctctgtatttttccagagaaaaaatgcttgcattagtgtatgtgttaattttattttattttattaatttatttttttttttttgagacggagttttgctcttattgcccaggctagagtgcaatggcgcgatctccgactcaccacaacctccacctcccgcgttcaagcaattctcccgcctcagcctccagagcagctgggattacaggccaacccacccagctaattttgtatttttagtagagacgggatgtctccatgttgatcagggtggtctcgatctcgaacctcaggtgatccacccaccttggcctcccaaagtgctgggattacaggcgtgagccacttcacctggcttttttttttatgttaattttagaatttatctcacagagatttttttcccccatcatcctaaattattttcatcacagcacttaccactttctgtttttgtttttttttttctttgagacagggtctcactctgtcacccaggctgaagtgcagtggcatgatcatggctcactgtaacctcgaaatcctgggctcaagcaatcctcccacctcagccttctgagtgtctggggctacaggtgtgtgccaccatgcctggctatttttaaaaattttttgtagagaggtattctcattatgttgcccagaccggtcttgaactcctggcctcaactgatgctcctgcctctgggtctcaaagtgctgggattacaggcgagaggcaccacgctgggcctatttgtatgtacttatttattgtttcaccctattagaatactatccccatgaggtctgggatatgagtctggtttgttcactgctgaagtctcagcatctagaacacttcaggtaggagctacaaatatttattaactgaatgaatgctgagaattgcactagatttattactataaaatgtgttttcacttaatgtccttctgtatcagtgcttgccagtctgtttttgtttgtcacgacagcttccatctttattccttcaagccaggaacgtgatactgataataattcatttttactgagcacctactttatccttggccctgtgcattttctcattcagtccttagaacccttccttaagcaaatgttattcccatttttcagattaaaaaaaaaaactgagtccaaggaaagtcacacagctaggtagtggcagagccaagctttgaatcactcaggtttattagattccaatctccacacactttttgtttgtttgtttgttgtttgtttgtttgttttgagacagggtcttgctctgtcgcccagtgatacgatttctgctcacttcagcctcgacctcctgggctcaagctatcctcccatctcagcttcccaagtagctgggactacaggcccatgtcaccatgcccagctaattttttgtaaagttggagtttcgccatattttccaggctaatctcgaactcctgggctcaagtgatcctcctacctcagccttccaaagtgctggcattacagatggaagccaccatgcctggccccaatctccacactcagtggggtggatcgcttgagcccaggagttcaagaccagcctgggcaacatagcaaaaccccatctctacaaaaatagtacaaaaaattagctggacgtggtggtgcaagcctgtagtcccatctactcgggaggctgaggtgggaggagcatctgagcataggatgtccaggctgcagtgagccattatcgcaccactacaccccagcctgggtgacagagtgagacgctgtctcaaaaaagtttagaaaaaagaggccaagggctgggcacagtggctcgcgcctgtaatcccagcactttgagaggccgaggcgggcagatcacaaggtcaggagatcgagaccatcctggctaacacagtgaaaccccatctctaccaaaaatacaaaaaattagccggccgcggtgacaggtgcctgtagtcccagctactcgggaggctgaggcaggagaatggcgtgaacccgggaggcggaggttgcagtgagccgagatcgcaccaaggcactccagcctgggagacagagtgagactctgtttcaaaaaaaaaaagaaaagaaaagaaagaaagaaaaagaaaaaggaggccaaggaagataacacagaggcaaaggcgtacagagtggaggaggcgatgtggatgtaaccctgtaggcagaggctggagagatgcagtcagcagccaaggaactcctggagccaccggaagcttgaagaggcaagcaagttcctccgcctggagcctctggaaggagctcagccttgccaacagcttgattttggatttctgtcctccagaaccatgagagaatacatttgtgatgttttaagccatctagtatatggtaatgtgtcacaacagccacaggaaacgaatacagagcccgttgtgtggccacgaattcccctgagtccagtgagggcaattccaaattaaaacatgctaattttattctgtgaccttgtctctcaggaataattatccctgaagcgaaagaattcttgtacagtgtcctgcgccctaggaattacatatgggtgacgggcaccttggaagtggtggggtttttggttttttttttttttagactgagtctcgctgtgttgcccaggctagagtgcagtggccccatcttggctcactacaacttccacctcccgggttcaagcaattctgcctcagcctctggagtacgtgggattataggcatgcgctaccatgcccagttaatttttgtatttttagtagagacgggctttcaccatgttggccaggctggtctcaaactcctgacctcaagtgatccacccactgtggcctcccaaagtgctgggaatacaggcgtgagccactgtgcccaaccactgctctgatttctgtccctatagtgtttttttagttttatgtaaaaggaagtatatagtgtgtgtcctttttggtctgacttctttgactccgcataacgcttctgaggttcaccgatgttgctgtacgcatctgaggttcattccttttttttttttttttttttgagacggagtcttactctgtcaccaaactgtgacaggaggagtgctgtggcacaatcttggctcaccacaacctccgcctccccggttcaagcaattcttctgcctcagcctcccgagtagctgggactacaggcacccgccaccacgcccagctagtttttgtctttttagtagagacagggtttcaccatgttggccaggatggtctcgatctcttgacctcatgatctgcccgcctcagcctcccaaggtgctgggagggcgaccgcgcccggccagtacattcttttttgttgctaggtcatattctgttgcatgaatacattgcagtttgtttattcattcacctgtcgtcggccatcgagttgtttctagtttttggttcttagaaataaagctgctgccgggcgccgtggctcacgcctgtaatcccagcactttgggaggccgagacaggcggatcacgaggtcaggagatcgagaccatcctgactaacacagtgaaaccccgtctctactaaaaatacaaaaaaaattagctgggcgtggtggcgggcgcctgtagtcccagctactagggagactgaggcaggagaatggcgtgaaccctggaggcggagcttgcagtgagctgagatcgcgccactgcactccagcctgggtaacagagtgagactccgtctcaaaaaataaaaaagaaaaaaaaaaaaagaaagcctgaagggcgactgaaagtcagagggaacagcaggtgaagagctgtgtgctctgtgcccacctaggcacatatgcccaccccttccctgttccccccaacttcctgccccatcagccaggggtcccacagcaccagagggcacatgcagctgggatatacgtatatatatgtttttttcctttttgagacggagtcttactctgtcgcccaggctggagtgcagtagcatgatcttggctcactggaacctctgcctcccagctttatgctattctcccacctcagcctcccgagtagctgggattacaggtgcgcaacaccacgcccggctaatttttgtatttttagttgagacggggtttcaccatgttggccaggctggtctcaaactcctagcctcaagtgatccacctgcctcagcctccaaaagtgctgggattacaggcgtgaaccactgcacctggccggaatcacaagttatgtgtcggtcactcagagactcagagactgccttcagaatccctgtttctcaccaaggactgttgggaggaggcctcagggtgctgtctccctggatccaccaagacctcattcctctttgtgctgtgccagccctccatgtggtggagcacgtgggctctggagctaggctgcctgggttcaaattctggctctatcaccctgtggctgtgtgatcttgggtcagttccttcacctctctgagccttggcttccttctctgcaaaatggcagttgtaatgagacttaacctcatggagaggttgtgagcagttcacgagaccatgataggtattggcacagaacccagggatggtaaatgctcacagttattagaaaaggcagagtgggccaggcatggtggctcatgcctgtaatcccagcactttgggaggccaaggcgggcagatcacaaggtcaggagatcgagaccatcctggctaacatggtgacaccctgactctactaaaaatacaaaaaattagccgggcgtagtggcacgcgcctttagtcccagctacttgggaggctgaggcaggagaatcacttgaacctaggaggcggaggttgcagtgagccaagatcgcaccacaacactccagcctgggccacagagcgagactccatctcaaaaaaaaaaaaaaaaaaaaaagcagtgtggtctagctgtttgtagactcagttccggttcacatcctggctctgtttacaaatcgtgtggctctgtgcctcagtttccaaatctggagaatgagattgtatcagtctcatggtgttgagtcttatgaggattaaattgtttgtgtaaaatgcttagaatagtgcctggtagatatgattattcaatatgcacgaagattattctctgctctaagcccccacttagaaccagagcgtgtactgcagtttcaaacaggccctcagagtgccacccacctctggcttgtttctcaaggaatcctgaagaatttcttctgcccagccgtttaccagagaaatcatgctctatgactccgatgtcagctggggcctcccagactgagagagacccgaatcagtgtgaggagcacagaatgtggtcagaggcctgttttcaattcctgttgtgctttgctctgtagccttagacaagttacttagcctttctgagctttactttcttcatccatagaatgagatgatgatcttaataatagtacagtttgataatctaatctcttatctggtcttttttttttttttgagatgtaggggggtatcactctgtcatccaggctggagtgcagtggtgcaatcacagttcactgcagccttgatctgctggcctcaagcgatccttccacctcagcctccagagtagctgggactacaggtgcatgccaccgtgcctaatttttttttttttttttttagtttttgtagagataggggtcttgctgtgttgaccaggctggttttgaactcctggcctcaagcaattctcccaccttggcctcccaaagtactgggattacaggcgtgacccactgcacctagcccactacagaagtattgatgggattataagggcttcccgcatccccctgggaagtaaattctacaatataaggtatagtcactgtatcatttttctaaaatccaaaactctgaaccacatatacccctgaaaccacacctggctgagggtttttataagggattgtggacctatagggccataactcacagggttggcaggatatgatgggttaatgatatgaaggaatgtggcatagtgcctggaacacaagatagctgttactgtttttgtttcagttaaattgtttcacctttcacaccagccactggaaaatgacctgacatcctgagaagtccgtaggataaaagaaagctgtgtttccgccgggcgcggtggctcacacctgtaatcccagcactttgggaggcagaggcgggcagattacgaggtcaggagatcgagactatcctggctaacacggtgaaaccccgactctactaaaaatacaaaaaaattagccaggtgtggtggcaggtgcctgtagtcccagctacttgggaggctgaggcaggagaatagtgtgaacccgggaggcggagcttgcagtgagtcaagatcacgccactgcactccagcatgggcaacagagagagactctgtctcaaaaataaataagtacataaaaataaaaataaatgcagtcctggaagacttcaggccatggaagcagttttcagtacttgttttagcagccacatcatttttccaaattaaatcttacatggatttccccccatatgtcaaggggcagactatgatttcattagcatacatttattttatgagttcatatttgtacaaaagagcatctcaatcacaaagaacaatgaagagttttagctgaacccccttttgaaatcaggggtttacagaagccagatgcagccctccaacagctggcacattcaatttacttgtgaatttttgcttgggatttgccctaccagtgatgttttcactcagctaagtagcttcaaatggtgacagttttgcatgacaacttgcattggagtcccaggatacactttggtccagaaaatcttgaaagagaagtggtaggattttgatttcatgggcaacattgaacaaccacgcatgttgtgtatcacaaatataaatgttatacccctgaaatccacaataagcacaaaatacagtcttcatgctgcaatatgataagaaatgtcacactatcccttattatacaacgattatgccttgatgggagagcagcatgcaacaaacacgctggaggctttcgtagcatttattcaagctcagactctgggatgcaataacgaacacagtagtacaatattctgcgagtgggtatgcccaggctgggcatttacaaggaatagaaaaatcaggccgggcgtggtggctcacgcctgtaatcccaacactttgggaggccgaagtgggcggatcacaaggtcaggagattgagaccatcctggctaatacggtgaaaccctgtctctactaaaaatacaaaaattagctgggcgtggtggtgcgcacctgtagtcccagatactcaggaggctgaggcaggagaatcacttgaacccaggaagcagaggttgcagtgagccaagatcgtgccactgcactccagcctgggctacagaaggagactccacctcaaaaaaaaaaaaaaaaaaaaaaaaagaatcaacagagaagctgggcgcagtggcttacacctgcaatcccagcactttgggagaccaaggcgggagattgagaccatcctggccaacatggtgaaaccctttctctagtaaaaatacaaaatttagctggacgtggtggttcatgcctgtaatcctagctactagggaggctgaggcaggagaatcgcttggaccagggagtcagaggttgcagtgagctgagattgcacctctgcactccagcctggtgacagagcgagactctgtctcaaaaaaaaaagacgttaggagtctctgacattacaatttggtaggctgagtctttgtgttgtgtgtaagttacatttttgaaaagagattcagtcaaacctttgcagatccttgaactaacaagtttgcaaattgacaggtccgttgtctctgagcaaaagatctgcctactcacatgtatttggattttacctgatttttaaaattcttcttcacctcagtgttaacgtcgttcattggtaactcttgaaaatggcctcttaatgatttacctccttttggaccattgcccagaagccttgcctcttctttagagagtggagttcactcctcctcaccaagccagagcttctggaatttaacttggggagactcacaccctcaccccaggcgccaatcggggcagaagggtcccgcttctgaccacttctgtaagagagactcagcgtgtagagaaagacgacagcttttcaagagccgcttacagatcagtgagttcctcagaggtggggagcaggcaactcactctcagccatggtttctgcttgacatgcgcaaaacagggtggcccactccgaacaagtttgtgccagaggtacattcaaggtacatgcttttgaaacacagaaaacggctctagactttgcaataacaggatttccaggagggcgcaaagctagaggggtccgtgccgcccgcctccccccagcaagagaggctgtccccagaatcaggccgtgggtgacagccgaaggaggatggcggcccttctcccgagtagggatctccctgacacgttcctcctgggtctgcgtgagttttcttcaactccagtaagagatctgcaaaaccttggaatccaggaccgtttccacctcctccattttctgcaaagggcgcaggcgcctggggtcagcctgtggtctccatagcaacggtcggacgcgctgctaggttctggctctgactgcgcctgcgcggctggtcccgcggggtctcccgagtagcggaagatatttgtgggtctttgagacccttcctcgcttagaaattactctcatctactcaaatgatacccatacacatattcaggtgttacccgcacactctcaaatattacccacaactactttcaattatacgcggatgccacccacacactctaatgctacccacactcactaacgtgtattcaagtaacccaaatgttacccgcacctactcaaatagctactatgagagtcacgggcaaggttttggtctgtttattccccttctgtatccccagtgcctggcacactgtaggtcctcaggaaattttgttggttgcatggatacatggatgaatgagcaatccacactcaaccagattttatgatcattcagctgttacccacatgtactcaaatgctacctacgctcactctgatgtctccaagtaattcaaatattacccacttactctgagtgccatgaaggcagggatttttattgagtttactcccttccatatccccagctcctggaacatagtaggtatgcaataaatatctgtaagatgaataaatgagccacgggcacccagacgttaaccacacccactcagatgtaacccacaagttagttaactcagataaagatatccacctctttcgcactagtcagatgttacctgtgctatccaaatgatacccattcttactccaaagttacccactcactagagtcattcccaccctcccttgcattacccacactcactcgcactccttaaacgtagtgaggtggtacctaccctcccacagtcatcacccacaccccctcagacactccccacgcccacccgatgccaccacctcacagcttcttgtctgaggcgtgatgccgccggcggtttttcttgttcttccttttgcccctcttgccaactccagccttgctctccttctcggaggagtccagaggtggcaccacgtccatctggacggtggccccagcctccggtttctcccccagcccaggcacagagcactttcttgcaggcagctctctggggcccgtggctgggggacacagttcctgcctcaggacccgggccatatcctccaccgtcctgccctcgctctgcagaaagaggttcagcttggtcaggaattcaatgtcctgcttccggggcatgtagaccactctccacacaccgcccttgcccttgatctccctggggaccacggcgtaattgatgtcctccgtcagctgaatgatggccgccttggatttatcttcttccagataggccttcccagccacttcgaacttgcctagaggtttgaggggcagccgaataatctcttcgaattcctcgtggttgcagtcctccgggatccccaggatcatcagggacttgtaactgtccacctccagggccttgcacccgtgctccaacagtgcaatgtccttcaccccgaacagcatcttgcccaactctttgaggcagcagtatgcccgctggtggacacctgagctgcctcgggaatccacgaaattatccaggatgccgcgattccttcccaaaggctacgagagagtgaggcctcaggggccggaggccgctcccaggaccccttcgtccagctcagtgaaggatgcccccagcccctgcctgcagggctgtgcaacgtcggggcttctgtggctccctctgagtgggctcgaagattcccagggacttacgcgtgctggagaagcagaaggcggtgtttgccacctgactcgtggctcccgggtcctgggcaaggctgcaccaaggagggtctaaagatgatgcttcccctttcttggcgtggcctccgaaggtctcacaggccccaacggtctctccggatctgggactgctgatctccctgggacaactgccaacagagtgtcgtaggcgcggccctggcaggcagggaggcgcgtccctcaccgctggcccagaggttgcactcagtgccctgtcgccggactaggacgaggatgtggccgctgcacttgctcccgcggtgacgtcaccgcctccttccgctctgcggcctggcggtctccatggcaaccgctgaagcatccatctcctctgccattggccgactggccgcattgaaatcaagagtctgagggggtcattcggaggtgaggggtcggccaccagccctcagaagcgcccgcgattctcctttgaataatagccgattccaggggtgaggggacagcgaatgtacaagaggcacccggggcatcttttggggtcagaaagtaaggaagtgattaaaaaaaaaaaatgagaacacctggaaagacagaggaaccagcctgaaatgctcccactggccaaccctgggacaatttgagcatcaacgttaaaaatgaaagtaacagattataaccccttgaataaaattagaatctatgagttgatgtagatataagcacgtgaatgcaaagtttggtgaagaatgtgaactatcaaagtacctgcccatataatactcatcaaagggaacaaatgtatctttacagtggaatgttcttgcatgtaggacacacacacacacacacacacacactataatattcagagcgatatgacaatttagactcaaaatgcttcagaggataaaacattcttttttttttttttttttttttgagatgaagtctccctctgttgcccaggctagagtgcagtggcccgatcttggctcattgcaacctctgcctccccagttcaagcgattctcctgcctcagcttcccaagtagctgggattacaggcatgtgccaccaagctcagctaatttttgtatttttagtagagatgtagtttcaccatgtcggccaggctggtcttgaactcccaacctcaggtgatccatccacttcggcctcccaaaatgctaggattacaggccacagccattgcacctggccgcgaaaacattctttatactatatttgcaactcttctgtaggtttatggttgtttcaaataaatgtttaaaaataaataagaaatgtctcccccatgtgatgacatccacaatgtctattcctctcctccccagtccccattaataaagccaaaacatttgggttaggtcgacaccctttatacccccagttccagggataagccctgattggcttgaaccaattagcataatctcaccctccttcccacagtgattggttcagaaatggtcacccaggtaacctggacaaaaagcaattagtgcttaatatgcccctcttctctgagattggttaaaggttagacacgtgaactcagtaagtccagtcagaatgaaggtaaggatttctgcaactggtaagcggaggaagactctctctttcctcctagacgtgaaagactaagtataggagctacaggaggctgtcttggaagcatgacaaactctcttccttccttccttccttccttccttccttccttccttccttccttcttttttctttctttccttctttctttcagacagagtcttgctctgtcgcccaggctggagtgcagtggcgcgatctcgactcactgcaacctcaacctctcaggttcaagcaattctcctgccccagcctgtaaaacagctgagattacaggcgcccgccaccacgcccggctaactttttgtgtttttagtagagacagggtttcaccatgttgtccaggctggtctcaaactcctgacctcaagtgatccacctgccccggcctcccaaagtgctgggcttacaggcatgaaccaccgcgtccagccaataaacactttgaggatgaactttgcatctagaggaaggcagagttgagggaacaaccagaaaccaggccatagtcaggaagacatcatatgcctcaggatcaaacaacacctgaaaccgacatcccctgaaactttgtttttacacgtagtcagaagtgcacgaattataaatgaaaatccattaactgaacacatggtgtaaccagcacccaaatcagtaaatgaacatcatagcattcccagaggatatcctgtgctttctccaaatcactatatcctcttaagggaagccactatcttgactttcaacagcataggttagttttgcctgtttttgtattttacataaatggaatcacatattacgtggtctatgtttcttggtgaacatatatgtacatatccattagttttaagcctgaacaaatgccttagcagattctacaagtttcccaaactggtcgtaccattttattctcccaccaaacagtgtaaaaaaaaaaaatccagtttcgccacatgctcatcaatactagatttttttttttcctgagatggagttttgctcttgttgcccaggctagagtacaatggcacgatctcggctcactgcaagctccgcctcccgggttcacgccattcttctgcctcagcctcccgagtagctgggactacaggcgcccaccactaggcccggctaatttttttgtatttttagtagagacggggttttaccgtgttagccaggatggtctcgatctcctgacctcgtgatctgcacgtcttggcctctcaaagtgctgggattacaggcgtgagccaccgcgcccggcctgatgcctccggttttatagtcaggaaaaccgaagatcagagaggttaattcacttacctaaggtcacacagctagtgaatggcaaagctagacttcccgcctcagcaccctgactcctgggcgcacagatttaacattatacaataccatggagttccctgagaaaggggtcccatattgtgtcacgcggcttagttcctgttctgtcgtgaagtttctggatgacagttccctctctgggctgtatgttgattttgttcagtgccagtttagctaagctgggcttgtgtgtcctagaatagctttctgcaggtggctgttggttagagtcgtctaaaagagaaatgtgcattagatttacacagcggctggtgctgtgagaaggtctgcacagggtgccacatggctcatgcatttcatgactggtctgtgggctcaccttattggcttggggcagcctctgggactccacctgctcctgccggtctccttttcagcgtcggtgaacttggggccagcaccggagcagctctgtgggggcaaaaggcaccagcttcccctgcaggtcaagcgtggaattgaggttgaaggtgggaaaagagacgttggttgggggcgggggttccagtttgtcttcaaggattctaatttttttttttttttttttttttttttgagacggaatctcgctctgttgctcaggctggaatgcaatggtgccatctctgctcactgcaacctccacctcccgggttcaagcgattctccggcctcagcctcctgagtagctgggattacaggcacccgccatcatgcccagctaatttttgtattttcatagagatggggtttcaccatgttggccaggctggtctcgaactcctgacttcaaatgatccgcctgcctcaatctccaaaaatgctgggattgcaggagtgagccaccgcacctggcctagattgttcttgtaggttccaatttgtcctctctgtcccggttcagtttctaaattgcccagcagactggcctacagagacttaaaacccaatactagtcacagaaaaaaaaactttgatacacccctcctccagcaaccctagcgctccctggttagtaattttttttttttttttttttttttggagataagggtctctctatgttgcccaggctggtatcaaactcctgagttcaagtgattctcccacctcggcctcccaaagtgttgggattacaggcctgagccaccacgcccagcctcagtaacttttaaacaagatctcgccatccctatattattattattattttgccatcacgaatatagtttatttttaaatttttaatttttaattgtgcgggtacatggtagctgtatatatgtatggggttcacaagatatttgatacaggcatgcaatgagaaataatcacattgtggagaatgaagtcgccatccccttaagaacttatcctttgtgtgacaaacaatccaattacattcatttagctattttgaaatgtactattattattaacaatagtcatcctgttgtgctatcaaatagtatgtcttattcattctttctatttgtgttgagtattgtacccattaaccatccccacctcccccatccatcccgccgacgacccttcccagcctctggtaaccttctgtctatatgttaaaaaaaaaaaaaaaactgctttttttgttttgttttgtttcgagatggagtctcactctgtcgcccaggctggagtgtaatggtgcgatcttggctcactgcaacctctgcctcccaggttcaagtgattctcatgcctcagcctccctagcagctgagattacaggcacgcgccaccacgcctggctaatttttgtattagtagagatggggtttcaccatgtcagccaggctggtctggaactcctgacctcaagtgatccacccgcctcggcctcccagagtgctgggattacaggcgtgagccaacatgcctgtcctcgttcaattgttttgattattttaattcccacaaataaatgagaacatgccgtttgtctttctgtgcctggcttatttcacttaacataatgacctccagttccatccacgtttttgcaaatggcaggatctcattctttttcatggctgaatagtactccattgtgtataagcaccacattttctgtatccattcttctgttgatggacactcaggttgtttccaaatcttcactgtcgtggacagtgctgcaaaaaatatgggagtgcagagatctccttaatctactgatttcctttcttttgggtatatacccagcagtgggatggcaggatcaatttttagcttaatttttagttttgaggaacctccaatttacattcccaccaacagagtatgagggttcccttttctccaccagcatttgttctttgctgtcttttggatataagcttttttttttttttttgagacggagtttcactcttgttgcccaggctggagtgcaatggtgcaatctcggctcactgcaacctccgcctctcaggttcaagcaattctcctgcctcagcctcatgagtagctgggattacaggcatgctccaccacgcctggctaattttttgtatttttggtagagacagcgtttctccatgttggtcaggctggtcgtgaactcccgaccccaggtgatctgcccgcctcagcctcccaaagtgctgggattacaggcgtgagcaattgcatctggccagatataagctattttaactggggtgagatggatatctttatcttattttagttttgaccaccatccctttctgggtcctcacctccccagattcacccccaattgtctaagatccaatcacataatgtttcttatcccacgtggctcatagcagacctccttctgcttaacacggaccaatcctgaacaaccatgactcttcctttataaacatcagttgcactaacatactacttttcaggttttccagtagagagaaaacaagggaagtgtgccctctcatttaggggttttaggaaccagctcttccacagagatttcttttaagtctaattttgtcataaaaaattttgcattcgagccgggcgtggtgactcacacctgtaatcccagcactttgggaggctgaggcgggtggattacctgaggtcaggagttcgagaccagcctggccaacatgacaaaaccccatctctggtaaaaatacaaaaattagccgggtgtgttggcacacaccagtaatcccagctacttgggagactgaggcaggagaatcacttgaacctggcaggtggagattgcagtgagccaagattgcgccactgcactccagcctgggtgacagagtgagactctgtctcaaaaaaaaaaaaaaaaaaaaaattcacattcgactccatgacatgaccattttaatacaaagatgagttttccttccaaagatgaagtaaaattgttgatccaaaatatttgccacgagtttatgaatccttgacacgccattgcatatccctgggcttatgcatgttcccaattgagaagcaagggaagagaatggttcatttatttgatccaccaggatttactgagaagtgtccttgttctaggcttgggtaacgtgctgggcatacttgagtgagggagacaggctctgctttgaggagctcagtccagtggttacgacaggctggctcagtctgtttacaggcagggagagaagccctataattactacgatgtgttccgatcctggtgtggggtgtagaatacagaatatatcaagtgggcttagttttcctggaacatgttttgctagagtttaaagagagaaccgcataaagtcctttggcggccctgagatacctgactgacataattactgtatcagtaacctttttattaattcactcttcaacgtctctgattaattctccataaaggaattcatctgtctggtctcatctgggaaggcttcccgcaggaggtgacatttgagagaaatcttgatggatgcatataataaccacaaataatactattttaaaaagtaataactgctaacttttgcatagggcatactaaaatattctaagccttctatgtgtactaagtcatctaatttttacaacagtccatgagttagatgttttattgattcaatcatttattcattcaacaagtatttattgaatagttcctgtatcttatagtcaggaaaactgaggaccagagaggttaaatcacttacctggggccacacagctagtgagattttttttttttgagatagggtcttgctctgttgcccaggccggaatgcagtggcgcaatcatggctcactgcagcctcaacctcccaggctcaagcaatcttcccacctcagcctcctgagtaaccgagactataggcgcatgccaccacacctagctaacttaatttttttttttttttttttttgtagagacagagtctcactatgttgcccaggctggtctcaaactcctgagctcaagcaatcctcctggctcagtctcccaaagtgctgggattacaggtatgagccattatgcctggccaaatgagttttgttttttttttttggggggacgaactctcgctctgtggcccagcctggagtgcagtggcgcgatcttggctcactgcaacttccgcctcccgggttcactccattctcctgcctcagcctcccgagtagcggggactacaggtgcccgccaccacgcctggctaattttttgtattttttttagtagagacggggtttcaccacgttagccaggacggtctcgatctcctaacctcgtgatccgcccgcctcagcctcccaaagtgctgggattacaggcgtgagccaccgcgcctggccttttttttttttttttttttttttttttttttgagacggagcctcgctctgtcacccaggctggagtgcaatggcgggatctcagctcactgcaacatccgcctcccaggttcaagtgattctcctgcctcagcctcccgagtagctggaattacaggtccccaccattacgcccagctaatttttgtatttttggtagagaggggggtttctccatgttggccaggctgatctcgaactcctgagcttaggtgatctgcccacctcgacctcccaaagtgctgggattacaggcatgagctaccacgcctggccgagatttttacaatttgatttagcttaatttttttccatgaattttctgtttgtatcttttacccatttttattaaaaaatggggtttccttttttgctgaagagtaaaaaagctttacagataaaggaaattagcatattatcacaccacatgtaatagcttagttacttgttttttgttggtggctttttttttttttgagatgcagtctcattctgtcacccaggctacagtgcagtggccgatctcagctcactgcaagctccgcctctcaggttcatgccattctcctgcctcagcctcccaagtagctgggactacaggcgcctgccaccacgcctggctaattttttgtatttttagtagagacggggtttcaccatgttagccaaggtggtctcgatctcctgacctcttgatctgcctgcctcagcctcccaaagtgctgggatcacaggcgtgagccaccgcgcctggacgatggagtttttttttttttttaaataatctatatatatatatttattattattattttatttttgagatggaatctcactttattgcccaggctggagggcagtggtgtgatctcggctcaatgcaacctccgcttcccaggttcaagcgattctcctgcctcagtctcctgagtagatggtattacaggcgtgagccaccacgcctggctattttcttcgtatttttagtagagtcaaggtttcactatgttggccaggctggtcttgaactcctgacctcaagtgatccacttgcctcagcctcccaaagtgctgggattgcaggcgtgacccaccgcgcccggccttggctaagttacttgttggttagagtctaggttctggggatagagcaatgaatgagatggacaaaatcccctgatttccaaaagctgacactgtattgggccgacagagcagggacaaataaataagatatataatatgtcatgtggtgatcaggattggttacggggaaaaataaagcaggaaagacagagaagggccaggactcacgcctgtaatcccgccactttaggaggccaaggcaggaggactacttgagcccaggagtttgagaccagcctgggcaacaaagtgagaccccaggctgcagtgagctatgatgataccactgcactccagcctgggagacagagtgagatcccatctcaaaagaaaaaattaaattaaaaagacagacagagggccgggcatggtggctcacgcctgtaatcccagcactttgagaggccgaggtgggcggatcacgagatcaagagatggagaccatcctggctaacacagtgaaaccccgtctccactaaaaatacaaaaaattagccgggcatggtggcgggcgcctgaagtcccagctactcgggaggctgaggcaggagaatggcgtgaacccgggaggcggagcttgcagtgagccgagatcgcgccactgcactccagcctgggcaacagagcgagactctgtctcaaaaaaaaaaaaaaaaaaagagagagacagagcgagagagacaggcatagagagtgtgtattgggagaggatgttataatttacagtgtgccaagtaaaggtttcatggaggtgacatttggagcaaagacctgaaggaggtgagagagccaccttgtgaacatgtgagggaactgtgttccaagcagaaggaacagtcagtgcggccgggcacggcggctcacgcctgtaatcccagcactttgggaggccaaggcgggtggattgcctgagctcaggagttcaagactagctgggcaacatggtgaaatcctgtctctactaaaatacaaaaaattagccgggcgtggtggcgggcgcttgtagtcccagctactcgggaggctgaggcaggagaatggcttgaacctgggaggcggagcttgcagtgagccgagatcccgccactgcactccagcctgggtgacagagcgagacttcttctcaaaaaaaaaagaaaaaaaaaaagtcagtgcaaaggccctgaggctggagcctgcctggtgtacttgaagaacagcagaaacccgtggtgcctggcagcagagggagcaagggagtgttgagaagaaagcccaagaaaaagcaggccgcgcaagagaggaggtgacagccagatcttacaagacctcaaagctcctggtggggacttgggacttttctctgggtgagatggaacacccaaggtggggaggtttgatgaggtaactgagggcgttataggagtttgccagtcaggaatgatgttggagtaggaggatgtaggtttctgagagttgaaaaggaacaattaatccttcacacagcaaatgtatatatttatacatttaactctggctctgttccaaaccttgtgttaacagtgagcccaatagctattaatacaaatagaatgtaatgccaggaatttagccactcataacttacatgagttatgaacttttttttctttttgagacagggtctctctctgtcacccaggctggagtgcagtggcgtcatcctggctcactgcaatctctgcctcccgggttcaagccattctcctgcctcagcctcccaagtagctgggattacaggagcacaccaccacacccagctaatttttgtatttttagtagagatgggggtctcaacatgttgcccaggctggtcacgaactcctgacctcaggtgatacacttgcctcggcctctcaaagtgctgggattacaggcgtgagccaccacgccctgcctgaggtgtcgtttttgacatttaaatctgcaatctaggctgaggatggtggcgcacgcctgtaatcccagctacttgggaggctgaggcaggagaatcgcctccacccaggaggtggaggttgcagtgagccgagatgatgccactgcactccagcctaagtgacagagtaagactctctctcaaaaaaaattaaaaaaaaaaaaaataaataaataataaatctccaatctacctctaactttatacctttccagatggctattgagtgtcttagttttatggagaaaagtccatctcgttttcaatgatatgaaattccactgttaaaatgtaaattcccagctgggtatggtggctcatgcctgtaatcccagcactttgggaggccaaggcgggtggattgcctgagctcaggagttcaagactagctgggcaacatggtgaaatcctgtctctactaaaatacaaaaaattagccgggcgtggtggcgggcgcttgtagtcccagctactcgggaggctgaggcaggagaatggcttgaacctgggaggcggagcttgcagtgagccgagatcccgccactgcactccagcctgggtgacagagcgagacttcttctcaaaaaaaaaagaaaaaaaaaaagtcagtgcaaaggccctgaggctggagcctgcctggtgtacttgaagaacagcagaaacccgtggtgcctggcagcagagggagcaagggagtgttgagaagaaagcccaagaaaaagcaggccgcgcaagagaggaggtgacagccagatcttacaagacctcaaagctcctggtggggacttgggacttttctctgggtgagatggaacacccaaggtggggaggtttgatgaggtaactgagggcgttataggagtttgccagtcaggaatgatgttggagtaggaggatgtaggtttctgagagttgaaaaggaacaattaatccttcacacagcaaatgtatatatttatacatttaactctggctctgttccaaaccttgtgttaacagtgagcccaatagctattaatacaaatagaatgtaatgccaggaatttagccactcataacttacatgagttatgaacttttttttctttttgagacagggtctctctctgtcacccaggctggagtgcagtggcgtcatcctggctcactgcaatctctgcctcccgggttcaagccattctcctgcctcagcctcccaagtagctgggattacaggagcacaccaccacacccagctaatttttgtatttttagtagagatgggggtctcaacatgttgcccaggctggtcacgaactcctgacctcaggtgatacacttgcctcggcctctcaaagtgctgggattacaggcgtgagccaccacgccctgcctgaggtgtcgtttttgacatttaaatctgcaatctaggctggggatggtggcgcacgcctgtaatcccagctacttgggaggctgaggcaggagaatcgcctccacccaggaggtggaggttgcagtgagccgagatgatgccactgcactccagcctaagtgacagagtaagactctctctcaaaaaaaattaaaaaataaataaataaataaataataaatctccaatctacctctaactttatacctttccagatggctattgagtgtcttagttttatggagaaaagtccatctcgttttcaatgatatgaaattccactgttaagatgtaaattcccagctgggtatggtggctcatgcctgtaatcccagcactttgggaggccaaggtgggcggatcacgaggtcaggagatcgagaccaccctggctaacacagtgaaaccccatctctactaaaaatacataaaattagccaggtgtggtggcgtgtgcctgtaatcccagctactcgggaggctgaggcaggagaatagcttgaatccgggaggcagaggtttcagtgacccaagatcgcgccactgcactccagcctgggtgacaaaccgagactccatctcagataaaaaaaaaaaaaaaagatgtaaattcccatatgtatttctggcccctctaatctgtcccttttaaccagttgtctgtccttttatgggccagtcccaaactgtttgaaaactatacttttatgatcagttttcaaatgcagaagggctgatttcctcttacattttcagaaatgttctgcatcttttcacatttttttcttttgaacctcagaatcaacctgcctaactttaaaagagccttttagtgttttaaataaggctagattaaattcatagactcggggggaaaccaggttcaactttttaatactggatcttcccaaatattcaaatcttgtatgctcagccctagcagcagtttcaagttttttgaactagatcctgtgccatttttgataagctcattccaagatatttttattatcttttaattcttgcttgagtaaatgcaatgttcttttcttctgcttgttttctaagccagttttctgtatactggcacttgtttaggttgaagatattaattttgcaaccctagagcccccttgctcaattctcatttcttccaatagtttatgggttctctttcaagatatacagtcacattgaggcaggagaatagggcctggaggcagggaacctaaggctgattcaccctgacttctagaactacatcgaaagaaaaacctcaaccttccacgcttaagtaacgaaaggaccaggggagactcctgcaaaccccaaccttttctgtggggcagatgggaaatcgaaggtacccctgattggttgcagaaagcatagaagtgtaacttcctaacttcacttcagcctctgattggttgctgtccacaaccactgtccacaaccaatcagactgattgcaggcgaggtctttgtttgcatagaagtgcaactttgtaacttcactttagcctctgattggtcgctttttgcttgcagaccaccacttcatttacatggggtgaacaccaagtggccaatgggagggccaggtgcagtggctcacacctgtaatcccagcactttaggaggccaaggccagcagatcacctgaggtcaggagtttgagaccagtctggccaacatggtgaaaccccgtctctactaaaaaatatacaaaaattagccaggcatggtgacagacacctgtaatcccagctactcaggaggctgaggcaggagaatctcttgaacccaggatgcggaggttgcagtgagccaagatcgcaccattgcactccagcctgggtgacaagagtgagactccatctcaaaataaataaataaataaaaataagtgaccaatgggaaacctataggaggtatttggacctaagaagatcctgtatccggggcccttgagcagctgctggggcctgctcccacactgtggtgtgtactttcacttttgataaatctctgctttccttgctttgctgtgcgttttgtccaattctttgttcaaaacaccaagaacctagacaacttgcagtcaagaccctctatcggtaacaacatcatctctgaagaatagacatgcttccttctttctaaggttcatactcttcttccttttccctatataattacatgagtcatgttccttgaatctgagcccagcactcaaggtttttgcttcctggcacagggcctggggcctctgtccatccttgaaattctttgcctatcattttctgctccaaaacggttatacccaaaggtgctttaccatgacttctcaggcacggaggcatcactccattgggagccatttcggcaggaagcttctctgactgtcccaagtcctcattccaataaacataaaaacaacaatcatattataggcattgacatgcattctgaagaaccttatattttgctcaatagcatgtttgttttttgttgttcttttgttttttttttttttttttgagacgaagtctcgctctgtcgcccaggctggaatgcagtggcaagatctcggctcactgcaagctccgcctcctgggttctggccattctcctgcctcagcctcccaaatagctgagactacaggcacccaccaccatgcccagctaattttttgtatttttagtagagacagggtttcactgtgttagccaggatggtctcaatctcctgacctcgtgatctgcccacctcggcctcccaaagtgctgggattacaggtgagagccaccgcgcccagcctgttttttgtttttgagacggagcctcgctctattgcacaggctggagtgcagcggcgtgatctcagctcactgcaacctctgcctcccaggttcaagcgattcttctgcctcagcctccccagtagctgggattacaggtgtgtgccaccacacctggctaatttttgtatttgtagtagacacggggtttcaccatgctggccaggctggtctcaaaactcttgacctcaagtaatctgcccacttcggcctcccaaaatactgggattacaggcgtgagccactgtgcctggtcagtagcatgttagaattaaatgagccttttgggaaaattcaggtgagggtaggttacccaaagactatgcagccacgttcaaacctttggtggtttatgtatttatttagagacagggtctcactcctgtcacccaggctggagtgctgtggcatgatcatggctcagtgcagcctcgacctcctaggcttgggtgattctcgtggccacctcagccttgtgagtggctgggactacagagacacaccacctcacccagctaatttttttttttgtatatttgtatttttagtagagacagggttttgccatgtcgcccaggctgatctcaaactccttggctcaagcgatcttcctgcctcagccttccaaagtgttgggattacaggcatgaaccaccacactcagccctttggtgttttttttgtttgtttgtttgtttgagatggagtctcgctctgtcacccaggctggagtgcagtggcgccatctccggctcactgcaagctccacctcccgggttcacaccattctcctgcctcagcctcccgagtagctgggactacaggtgcccgccaccacgcccggctaattttttttttgtagttttagtagagacggagtttcaccgtgttagcggggatggtctcaatctcctgacctcatgatctgcccacctcggcctcccaaagtgctgggattacaggcgtgagccacctctcctggtccttaatttttaaagtttttgtagagacggggtcccaccatgttgccccagctggtcttgaactcctgggctcaagtgatcctcctgccttggcctcccaaagtgctggaattacaaagtgctggtgacgtgaaccaccttgcccagctgtgtacactctaaatggttcattttatattatttctaaatggttcattttatattatgtgaatttcacctcaatacaaaacttttttttttttcagacggagtttccctcttgttgcccaggctggggtgcaatggcacgatctcggctcactgcaacctacgccaccccaggttcaagcgattctcctgcctcagcctcccgagtagctgggattacaggcacgcaccaccatgcccggctaattttgtgtttttagtagagatggggtttcaccatgttggtcatgctggtctcaaactcccgaccccaggtgatccacctgtctcagcctcccaaagtgctgggattacaggcgtgagccaccgcgcccggcttttttgttgttgttgttttttgttttttttaattgactcagctttgggcttgaactgttagaatgatggtgcgtccattcagtgagatgaggaagctctagggaaaatgaacttgggagtggggaatcccattttgaatgtcttaaatttgatatgccttgtaggcttccaagccgagttagatatatgagcctggagttcagagatggggtggagataaaaatttagaagccattggcacacgggaaatatcttaagccatggagctagatgagctcatttaggccagaggtgtccaatcttttggcttccctgggccacactggaagaagaattgtcttgggcaacacataaaatacgctaacactaacaatagctgatgagctaaaaaaaaaaaaaaatcgcaaaaaaaaaaaatctcattttttgttgttgttgttgttttttgttttcgagacggagtttcgctcttgttgcccaggctggagtgcaatggcccagtctcggctcactgcaacctccacctctgggttcaagtgattctccttcctcagcctcccaagtagctgggattataggcatgcaccaccacacccggctaattttgtatttttagtagaaacagggtttctccatgttggtcaggctggtctcgaactcccgacctcaggtgatccgctcgcctcagcctccgaaagtgctgggattataggcgttgccaccgcacccggccaaaatctcataatgttctaagaaagtttacgaatttgtgttgggccaccttcagagccatcctgggccgcatgcagcccacgggccgcaagttggagaagcttgatctagggaaagggtgtggggaaagacgaagagatggcccaagcccatgcctctggcagtcccagcgtgtcagtgtcagacagcagacaaagaatccaggagacagcagaagagggctggggggaagcccaagagtgagtgtttggaaaactaaagagagtaacagcaatcggttggaattggagtgtatccatttatagaggactatgcttagtggtacacaaacataaattgtggcgcatccgtgtagtagaatactatgcatggttacacgaaataaggaggaagttctctatgtgctgagatgggaagatttcctttgtatgaaatgatttgctgacatcctcacaaaacactgtttaataaagcaaggtgtataacactgtaaaaaaaaataaagagagagagaaaaattccttttttttttttccttttcgagacagggtctcactctgtcacccaggctggagtgcagtggtgcaatcatggctcactgcagcctcccaggctccagcgatcctcctgcctcagcctcccaagtagctggaattacaggcacccgccaccacgcccggttaatttttgtatttttagtagagacaggttttcaccatattagccaggctggatctcgaactcctggcctcaagtgatccacccgcctcggcctcccaaagtgctgggattacaggcgtcagccaccgtgcctggccacaggactggctttcaatatgaagcacagaaacgtcctccaaggggcaggagagaaggacaagggcacacacgtccagcaaatgcagatttcctggtaagaagctgaagaaacaaattttattatttaacaaaaatgtagatgatgcttactatatgcctgaccctgttccaagcactttgcaaatacttcatttgcatgaaaagcctttgaggtagctactgttatattctgtcatcctcatcttacaaatgaggaagcaggcacagagggcaatcaccttccccaaagtcacacagctggtaagaagcagggctgcttaaaggtgggcaatcgggcagcagaattcacactcttaaacagtactccataatacttctctgtgcttgacctcctggggctcaagcaatcctcctgggctcaagcgatcctcctgccccagcctcccaagcagctgggatcacaggcttgcactaccatgcctggctaatttttttgtatttttagtagagatgggctttcaccatgttgtccaggctggtctcaaactcctggcctccagagatcctccagcctcagcctcccgaagtgctgggattacaggcgtaagccacagtacccagtcctctgtgctctgttcttgataaatgacattttattgtacagatgtgttttatttttagatggaagatcagtgggtgaagattcaggctggttcagggcactgggagtcttgaggagagaggagactcagaagctgccgtcttggagaaaaaaacttactagaaaaacaggaggactccatgtttgaggtttgtggtgctgggttttcagtgaaatcccagaggctggctgagatttttcctgcttcgtgggaggaaatggctttcgcatgggagggggaaagataagtatggcccagttcacagtctgtctgcaaatccccaggcactctggttccccggttctctcggggtcctggaatctggtgctgggtggcctgtctgcccttccaactggccacctggtccctgtgagctgaactccaggaacccagcatggccaggccaggctgcaggggagggaagggcctggaagcctgttcccaggccatggccaaaggaaacgagttaccttccaggaactggagcccagaggcaggggtgaggagctggggagctgggggcctggagggaaagcagtgcccagaacttgcagggcctctgaagctgggctggagtttggctctgggcacgagagccaacagggcctgtcatgggcacagtctccaccccatgatttgagggctgaataatggtcctcaaatacaaccacctcctaagtcctggaacctgtaaataggtgacttcatgtagcaaaagggacttggaagatgatcctgaattatctgggtgggaccaatgtcattacaaaggtctttataaagaaggccaagctcagtggctcacacctataatgccaacattttgggaggccaaggcaggaggatggcttgagctcaggagttcaagaccagcctgggcaacatagtgaaaccccatctctactaaaaatacaaaaattagccaggtgtggtggcaagtgcctacagtaccagctactcaggaggctgaggcaggagaatcgcctgaacccgggaggcggagattgcagtatgccaagattgccctgggcgacagagcaagactctgtctaaataaataaataaataaataaataaataaataaaatttaaaaagaaaagagggagacgagagggtcagaatcggaaaagggaacgtgccaatggaagcagggtttggagtcatgcaagaaacggccccaagccaaggaatgcaggtggcccctgtactctgggaaaggtgaggacacgtactcttccctggagcctccaaaggaacacggccctgctcatccattcagacttgtaaccttccgaactggcagccaataaattttgtgttgccttaagttaatccatttatggtaatttgttacagtgacagaagcttgagacagcaagtttctttttttcttttttttttttttttgagacagagtcttgctctgtcaccaggctggagtgcagtggggtgatgtcggctcactggaacctctgcctcctgggttcaagcgattctcctgcctcagcctcccaagtagctgggactacaggcacccaccaccatgcccggctaattttttatattttagtagagatggggtttcaccatgttggtcaggctggtctcaaactcctgatctcaggtgatccgcccacctcagcctctcaaagtgctgggattacaggcacgagccaccaagcccggcccgagacagcaagtttctttatctcctggggactctgtttctgaaactgtgaatcagtgataactgaatccctgcagcgttgtactgaggctattggacacagatacatcaagtgtttaggatggttgctggcactcagcaagtgcttgacaatattagctatcattatcttcaaagtgttaccaaaacaccaggggtttggtctaggtcatgctgctcacagcacagaaagccaataagggaagaaggctttaattgggcgctgccgctgaggagatggttcaatctcaaatccatctccttgaccagctaaaatcaggggtttaaataacagggaagaaatgtaacaatgtgtaagaaaacaggaactagggaggggcaaggaagcagtcatgatgaatgagaggtccattatctcattgtctggatgtgatgatctggtaagtttcagttatttgatactttttgtttttgagatgcctgaaagtgaaaggaactcagataaaacaaattaagtctcaagcttaaagaccagaagggtcagtttcctatgtttatccaaaaaactatctatgggactattgggtcagtttcaaaagtgtaggcaaagtattcatttgtccaacaaatatttatcgagcatttattatgttccaggcactattactgctggagattcagcatgaaccagacagataaacacttcctgcctcggccctgagccctcaggaaactttcaatctagggagggagaaagacaataaacaaaagaaatgggagaatggcgtgaacccggcagacggaatttgcagtgagccgagatcgcgccactgcactccagcctgggcaacagagcgagactctgtctgaaaaaaaaaaaagaaaagaaaaagaaatgtgtccttttagttttttgtggttattttttgccatacaaaaggtattaattcttatgaagtcatatgtagctatattttcttttctgttctagttttggtactcgtcttacaagaccttcttctctccaagaaaagcaaatgtgaagcacatcaaggtcttttttttttttttttttgagactgagtctcactctgtcgcccaggctgatgtacagtggcacaatctcggctcactgcaacctctgcctcccagttcaagcgattctcctgcctcagtctcccaagtagctgagattacaggcacctgccaccacacccaactaattttttgtatttttagtagagatggggtttcaccatgttgaccaggctggtcttgaactcctgaccttaagtgatccacctgccttggcctcccaaagtgctgggattataggcattagccaccgtgcctggcccaaagtcttaatagttataattgcttttgtttaaacttatatatatgtgtatacatacactcatacatatatacacacatatacacaaacatatatacattcatatatcacacatgcacaaatacatacaacatactcatatacatatgtatatatccacccatatatacacataaatgcacttatatatgcacatatacatatgtacataaatatacatagacacagaaaagcaaacatatacataaatttacacacatatatacacaaacatacacttagacacagaattatagacatacacacaaattcatgcccacacccatagacacacatatacatatatacacgcatgtatatgtccgtatagagagctctatgctggaatatacaaaaacattttttctcttttgaaggaaaacgagaacctgctatggcttttgtgggaggttggggagaagcagacggggcactctccgtttctaattttgtacagctggaatgtctaacactctgcatatcttattttaaaatgtctatgtgggctgttttagcaacaggatgataggtcagttcttgttttcatctttatatggctctttattcaataaaaacaaaaccactgccacctaaaaataaaatgctttaggagccaagaccacgttataggttacagtcacagtcattcttttttttctttatttttctttttctctgggtctggtataaagctttcatttaacctgatttactcttgccaatctgtcgctgaataagccattcatagccctgccgatccaggcctgggcatgtcctggtatgtcagattgtccaagccagcagctgccacggttcccattcctcaggcttcaagaaatgacaggagcatctgccaagggttcatccggccatggtgacctgagagctttataacaacaagtgattgtctaatgaatttgaacacaagggtttgctgttctaggtggcttcacagtgctacgttcagggtatttcccatgtgattttcttaattgtgataagaaataagagttgtgcaattccgctcagaaatataaaaaaattcctccaccaggacactttgaatccttctggatctatgtaaccaggattagaacaggcagctgtctaaccgccattactaggtccctcaagctatgacactgctggaaagaaagggagactaactgattgaacaacctaccaaatccaaaaaagaaatacaataattgagactggacaaagtagctcacgcctgtaatcctaacactttagaaggctgagatgagtggattgcctgagctcaggagtttcagaccaggctgggcaaaatggtgagacccctgtctctactgaaaaaatcccccccaaaaaaaaaaattggctgggcatggtgtcacacgcttgtggtcccagttacttgggaggctgaggtgggaagattgcttgagcctgggaggtggaggttgcagtgagccgagatcatgccacagcactccaacctgggttacaatgtgagaccttgtctcaaaaacaaaacaaacaaacaaacttcaaatgcatgaaactcgtccttcatagcttctgagatatgtctttctgcttagaaaagtactctccctgcttctaagagtatagattacttcaccatttgcagggaggcatttgatgtcttcatgctttgcatttacatctttcatccagctggaatttttctcagtgaaagtaacattggaatagtccatcacgctccaaagaaatgtttggccacttgatccttgtctcatctgctggcctgtaatgctgccttcatcaaaactgaaaatctcacatttagggacgccaaactgtcagaaatattatagattcataatgcattttagcgcctgatagggcatactcctgccccactgtgcatttcagagtttctgggttgctttcatatggtaacaatttttcagcagctcatcttgcatttatatgttaaactccagaagctggacaaagacgaggcgggatgctttacttttacagttaaatgactgggctaggtgcggcggctcacacctgtaatcccagcactttgggaggccgaggagggcagatcacctgaggtcaggagttcgagaccaacctggacaacacagaaaccccgtctccactaaaaatacaaaaaaggcgcggtggctcacgcctgtaatcccagcactttgggaggccgaggcgggcggatcacgaggtcgggagatcgaggccatcccggctaaaacggtgaaaccccgtctctactaaaaatacaaaaaaattagccgggcgtagtggcgggcgcctgtagtcccagctacttgggaggctgaggcaggagaatggcgtgaacccgggaggcggagcttgcagtgagccgagatcccgccactgcactccagcctgggcgacagagcgagactccgtctcaaaaaaaaaaaaaaaaaaaaaaaaaaaaaaaaaaaaaaaaaaaaaaaaaaattagctgggcatggtagcacatgcctgtaatcccagctactcgggaggctgaggcacgagaatcacttgaacccaggaggcggaggttgcagtgagccgagatcgtgcctctgcactctagcctaagtgacagtgagactctgtctcaaaaaataataaaataaaataaaataactaacactatcaataattgttcacattcacccagcactcatccgccatagcacaagaccacagccttacttcttacacattcgcttattttttgttgtgtttttttgtttgtttgtttggtttttttgagactgggtctcattctgtcacccaggctggaatgcagtggtgtgtctctgctcactgcaacctccgcctcctgggttcaagtgattctcctgcctcagcctcccgagtagctgggattacaggcacacgccaccacacccagctaatttttgtattttttgtagagatggggtttcaccatgttggccaggctggtctccaactcctgacctcaggtggtccacccgcttcagcctccaaaagtgctgggattataggtgtgagccactgtgcccggccacattcacttgtttttctagaactattatgcagggattggagcttttccaaagcagccatgcctgaggtttacttgtcattggacttgagcatgacaaggcatgcactttgcagacatcgaaggtagagtttttcagtggcaggcatgcccatgccagaaaaaatttcaaacgaaccaggacaggcagcgacccaccttccaaaacaaggatgctttgtataacgtgcaaatatttgtccagaaatggcaagaaatgcttctaagaactgcagaaaaatccagttaatttagcaatataggtgaatgtagtttggggtaatgtaactttttaaattttttgtttaagtataatgttgttttaatgtaaggaagtataaagaaaataaatgacccactatctgtcctgtccacatcagcattctaaaatataatgtgttaccaagcgtgagagttacagatggggacataatgaagtccttccctccattcccctcagttccccacctcagaagcaacccgttttccatttgttgtttttccttccagaaaaaaggaaaaagattgatacatatactaccatatataataatataatgtttttcatttataaaagggtcatcatatgtgcttgttacttatcacttcataaaatccctctccctctccctctccctctccctctctcgacacggtctccctctgttaccctgtctggagggcagtggactgatcatatcttactgcagcttcaaactcctgggctcaagcaattctcccatttcagccccctaagcagctggaaatacaggtatgtgcttggcctaaatccctatcccttccccttccccttctttccttcctttctttcttttttttttttttttcttttttgagacggagtgttgctgtgtcgcccaggctggagtgcagtggcgcgatctcggctcactgcaagctccgcctcccgggttcacgccattctcctgcctcagcctcccgagtagctgggactacaggcgcccgccaccgcgcccagctagttttttgtattttagtacagacagggtttcaccgtgttagccaggatggtctcgatctcctcacctcgtgatccacccgcctcggcctcccaaagtgctgggattacaggcgtgaaccaccgcgcccggccctttttttctttctccctttctctgtttctccttctttcttcttttattcttccctctctctttcttgcctttttttttttttttgagacggagtcttgctcttttgcccaggctggactgtagtggcgctatctcggctcactgtaagctccgcctcccgggttcacaccattctcctgcctcagcctcccgagtagctgggactacaggcgcctgccaccacgcccggctaattttttttgtatttttagtggagacgggatttcaccgtgttagccaggatggtcttgatctcctgacctcgtgatccacccgcctcggcctcccaaagtgctgggattacaggcatgagccaccgtgcccggcctcttccctctctctttctctctctgtcctcccttcccttcctccccgcctccctccttccttccttgtttctttcctttttttttttttttttttttttttttgacagagtctcattctgttcccaaggcagtggtgtgaacatggctcactacagcctcaacctccctgggctcaagcaatcctcccacctcagcctcccgagtagctgggactacaggtgtgcaccaccacacccagctaatttttattttttgtagagacaggatctcagtatgttgctcaggctggtcttgagcgcctgggctcaagtgatccacctgcctcagcgtcccaaagagctggaattacaggtgtgggtgacagagtgagaccctgtctctcaaacaaaacgaaaaccaaccaaacaccccaccaagcatgaaataaggatgtacatatagatgaatgcaatagagttgacagtctagaaaaccatcatgtgatactattttccgcatggctggcaaaagctctaagctttgtctaaaatcccgttccaggccaggcgcggtggctcatgcctgtaatcccagcaccttgggaggctgaggcgggaggatcacgaggtcagcatattgagaccatcctggctaacatggtgaaaccccatctctactaaaaatacaaaaaattagcctggcatggtggtgggcacctgtagtcccagctactcgggaggctgaggcaggagaatggcgtgaacccgggaggcggggctggcagtgagctaagatcgcaccactgcactccagcctgggcgacagagcgagactccatctcaaaaaaaaaaaaaaaaaaaagaaaaggaaagaaaagtgcttggcacactgtattatataaacctttgtgagattaaataagtaagcaatttttcagttttttatcttttttttttcctgtggattccctattgagattcattgccaggttattctgtatttctttttttgatacgtgcaagctctttgtgattcaaggaaattatcttgagtccatccttgtggtaaatgtgtccccgggtttgttgtttgtcttttgacttgtggattttttttttctgtctgaggatttaaatgtttatatagtcaggttgattaatcttttcctttatgacttctgggcttggctgggtgcagtggctcacgcctgtaatccaagcgctttaggaggctgaggtgggcggactgcctgagcccagcagttcgagatcagcctgggcaacacggcaagccctcgtctctataaaagacacaaaacagccatgcgtggtggcacatgcctgtagtcccagctacttggaaagctgacgtgggagaatcgcttgagcccaggagttcgagaccagcctggacaacatagggagaccccatctctacacaagatcaaaaagtcagccgggcacagtggctcacgcctgtaatcccagcactttgggaggccgaggcgggcagatcacctgaggtcgggaatttgagaccagcctgatcaacatggagaaaccccgtctgtactaaaaatacaaaaattagctgggcatggtggtacatgcctgtaatcccagctacttgggaggctgaggcaggagaattgcttgaacccaggagacagaggttgtagtgagccgagatcgggccattgcactccagcctgggcaacaagagtgaaactccatcccccactccaacaaaaaaaaaaagttaactcagtatggttgtgtgtgcctgtactcccagctactagggaggctgaggtaggaggatcacttgagtccaggaggtagaggctgcagtgagccacgatcacgccactgcactccagcctgggcaacacagcaagaccccgtctccaaaatacaaaaattcttctgcttccaaaattataagtaaactcattcctatttttacctaaatgtttattaatttcatttttcacatttacatctttgattcatctggaaggtatctgaggactcaaagaaggagctagggaaaccaactttattctttttgttttgtccaaatagctagccagttttcagagcattagctaagtttagaaaatctcttttctctcctgccgatttagaataaatagcaccatggctggtcatagtctaagttctcagatgtatgaagctctatttctgggttcatgattctgtcccaccattttgttggcctagttcctcaacacaagtaaactacagtgacatcgtatcctcacaatccattccttgatatatcagtgggactaatccgacgacatgaattttcattttccgggatattctggccattaacagagggtagtcggtttttattttttattttgtttgtttgtttgtttgagacagggtctcattctgtcgcctagagtgtcgtggcaggatcatagctgactgtaaccttgaactcctggcctcaagggagcctcccaacttagactccctagtagctgggattacaggtgcatgccaccatgattttaaatgcagtaatttgctttataatgtcaggacgtggtttggtgaaaccaacccagatgcttgtaagtcaaggatgaaaaacttgggtcacccggcatcactaacattccctaagagctgaacgctttcccctcataaatgtcagggtcacgggaagcaacaggaaaaccttctccaatgactcctctggggtggcttgttgcgccctccctccggaccacgcagcccctaaaggtcagtcccagaccttgagctcagtgtaatatctagattcatgctagagacatgaatcaaaggttcaattttatgagaacgaatgtgtagggcctgaattttaaacacggagccatgttaggctgcaaacagtcttaaaccacagcatgctgatcagaaatgtgaatgagacacacagggagggcaggggcaagtttattacaagatctataatcacacacaagatgcgttaaactgggcccatcagtggctggctttggtgtgcagcattgctatagctttggctgtttattcagtgcacaggattgtaaagatgaaaataaaatagccactccattgctttttatttattattatttttaactaattaattattttgagacggagtttcactcttggcacccaggctggagtgcaatggcgctatctcggctcactgcaacctccgcctcccaggtttaaacaattttcctgcctcagcctcctgagtagctagcattacaggtgtgtgccaccacgcctggctaattttctatttttagtagagacagggtttcaccatgttggccaggctggtcttgaactcctgacctcaggtgatctgcccgccttggtctcccaaagtgctgggactacaggcgtgagccaccatgtccggccattttattatttttttttaaatagagatgggggtctcgccgtgttgaccaggctggtcctgaactcctgggctcaagcgatcctcccacctagacctccataagtgctgggattacaggcatgaaccactacacctggcccagttactttttaaaaatagtttccattcaagtataatttgcatgtggtgaaatgcacacatttaaagtatatgtacaatttgatgatttttgacagaaattcattttaacacctgtgcaaccaccaacccagacacagaaccttccaccactccaaaaagttccttctcaaagtccttctccttactgagacacccactgttgtaatttttgccatcatagattagtttttcctattctagaacttcttaaaaatgaaatcatatagtacgtgggcatcttttacttctggcttccccttagcataaagcctttgagatccatcgatattttttttttttggagcttaatttgtggcatatattcctaatcccaatgatcaataatgtttgtatatcattatattagtatacagattcagtggtggctatttcatgtggtctctgaattatgcctttatatagtgtaggctctgtcctatttggcttggtaaacttacctagattaaacaagaggtgttaattgcacacagaggcctccttgttgtatggttagtacatctagaattatgtggtggtgagcactgctaaaaccagagaattagcttctgtctggagcttatgtaaggaatctagagttgtatatttggactggactctattagtctggaactcttttgctgcctacgtttttttgagatggagtctccctctatcacccagtacaatggcgcgatcccagctcactgcaacctccgcctcctgggttcaagcgattctcctgcctcagcctccccagtagctgggattacatgcacccaccatcatgcccggataatttttgtattttttgtagagatggggtttcaccatgttggccaggctggtctcaaactcctgacctcagatgatccacccaccttgacctcccaaagtgctgggattacaggcatgagccacggtgcgcagccccatcgatattattctatcagtcctgcagtcctgtttattgttgggtaaggttccactgaagggttgtactgatgcaggataggcaagcccccaaattgaggcttagtctaggagggttcttggcttcacccttgaaataattcaaggtcaagctggtggtgatagcaacttttcttgaggccgcagtgcacagccgcagcagagagactgctccttgcaaagcggggctaccccataggcagtgtgcctagaggagcagctcagaagcagtgctgctgtcatatttatacccacttttaattatatgcaaattaaggggtggtttatgcagaaatttccaggaaaaagctggcaacttcagggttgtcaagggcattgccatggaaaggggcagtaacttccaggtgttaccatggcaacggtaaactggcatggtacagtggtggccatgtcttctagaaagctgcttccaccccagacctgttttagctaggtctcaatttggtccagtgtctaagccctacctctagagttgagctccacctcctaccgcagtaccactcctagctatatacaagagaaatctatgcccacacaaaaactggtacaccaatgttcatggtggtattattcaaaatagtcaaaaagtggaggcaacccaaacgtccatcaaccaatgaatggataaataaaatgtggtacaacatttgggctgtttccagatttaggctattatgaataagtatgctattatgcacatttgtgtacacatctttggtggatatatattttcatttatcttaggtaaatacttaggagtggaatgtctgggtcatatcataagggtatgtctaactttttttttttttgagacagagtctcgctttgtcactcaggctcaagtgcagtggcgtgatcgcagctcaccacaacctccacctcccaggttccagcgattctccagcctcagcctgccaagtaacggggattacaggagcccgccaccatgcccagctaattttcgtatttttagtagagacggggtttcaccatgttggccaggctgctctcgaactcctgtcctcaagtgatcctcccgcctcagcctcccaaagtgctgggattacaggtgtgagccactgagcccagccagggtatgtctaactttttaataaatttccaaacagttctccaaagtggttgtactatctctggttactttaaaataaatgaatataagtatttattgtttgtggttgaaatattcaaagacacaagatgaaaagtgggactctgctgggtgtggtggtgcatgcctgttatctcagcactttggaaggctgaggcagcaggacagcttgaggccaggacaagcctgggcaacatagggagctgtctctattaaaaaaaaaaaaagtaaaacaattagctgggcaaggtggtgtgctcttggggtcacagctactcaggaggctgaggcaggaggattgcttaaacccaggaggtggaggctgcagtgagccgtgatcatgccactgtactcaagcctgggcaacagagtgaaatcctgtcttttaaaaattaaaattggccgggcgtagtggctcacgcctgtaatcccagcactttgcatgtctgtaatcccagctactcaggaggctgaggcaggaggatggcttgagcccaggaggcagaggttgtagtgagctgaaattgcaccactgtactccagcctggacaacagagcgagacacagtctcaaaaaaaaaaaaaaaaaaaaaaggagagtcacagaagaaacaccaaatcttaccctgggcactgggatgatgcctcatgtcatgttgccaagctgagacctgccacgcattctcttgctattatgtggccattcaggcctgaacaagagccaggacccaaggggtttgcaagagtcatgcctgagtttaattaagtgggacagatgtgctatttagaaccaggacacctgggagcaagtttaaaggcttggatgtgccctgcctgtgatgaactttagcacagaccagcacagttccctaatcctcttaattgttcataccattacaaaaagtgcaaatctaaaacagagatgaacagaaaaaaattattgcattatcgttaatctgaccacagtggctaatgttgcttgaataatgcatttgggtgcttttaaaagtctgcagtcagcctgggcaacatggcaaaaccctgtttctaccaaaaaatacaaaaatagctgggcatggtggtttgcacctgtagtcccagctacttgcagaggggctgatataagaggatggcttgagcctggaaagtcaaggctgccatgagccaagatcacgccactgcacttgagcctgggtgaagagcaagaccctgtctcaaaaaaaaattaaataaataaaatttaaaaagtctgtgatgttttattttttaatgtggggaaaatattaaaaagtaaattggccgggtgcggtggctcatgcctgtaatcttagcactttgggaggctgaggcgggcagatcacgaggtcaggagatcaagaccatcctggctaacacagtgaaaccccatctctactaaaaatacaaaaaaaaaaaaaaaattagccgggcatggtgacgggtgcctgtagtcccagctactcgggaggctgagacaggagaatggtgtgaacccaggaggcagagcttgcagtgagctgagatcgcaccactgcagtccagcctgggcaacagagcgagactccatctcaaaaaacaaacaaacaaaaaaagtaatttaaaaatatgtaggtcgtggtggggcacagtgtctcatgcctgtaatcccagcacttcaaaagactgaggcaggaggattgtttgaggccaggcattcaagaccagcctgggcaacatagtgagacctcatctctaccaaaaaaaaaaagttagctgggcatggtggtgcgcatctgcagtcctagctactcaggaagatcatttaagcccaggagtttgaggctgcagtgagctgtgaccacacaattgcactccagcctacatgatggagcaagagcctgactcttaaaaaaattttgtttttaaataattgaaaatactactcaaacacacatgaatctcaaaaacacgatgctggccgggcacggtggctcacacctgtaatcacagcactttgggaggctgaggcgggtggatcacgtgaggccaggagttcgagaacagcctgggcaacatgatgaaaccccgtctctatgaaagatacaaaaattagccgggcgtggtggtgcacacctgtagtcccagctacttgggaggctgaggcaggagaatcgcttgaacctggcaggcggaggttgcagtgagccaagactgtgccactgcactccagcctgagcaacagagtgagatgctgtctcaaaaaaaaaaaaaaaaaaaaaggccggggcgtggtggctcacgcctgtaatcccagcactttgggaggctgaggtgggcgggtcacctgaggtcaggagtttgagaccagcctggccaacatggagaaactctgtctctactaaaactacaaaattagccaggcgtggtggtgggcacctgtaatcccagctactcgggaggctgaggcaggagaatcacttgaacccgggaggcggaggttgcagtgagccgagatggcgccattgcactccagcctgggcaaaaagagtgaaactccctaaaaaacaaaaacaaaaacaaaacaaacaaaaacactatgctgaggaaaagaagccagacaccaaaaaaaccatatgctgtatgactccacttacagcactcctgggacagacacactgagctttggctggaaaaatcattacagtgctcacctctgagagctgcggcggggaccgactgggaaggggcacagggaggctttctaggatgatgatattgttctgtaacttgtcgcaggggtgggttacacaggtgcctgcctatgtccaaacttatccttatcagaccgttcacttaagatctgtccatttcactgtatataaatgttttattttaactaaaaaatgaaaatgtaaaaaaaaggaataaatgaataagtaaatcaacacaacccacttctttctccttggcagctctgctaaccagatccccaaatgggcagctttttcttgggcctcctgggtccagctactgtcacctccccactaggctcccagctgccacctcaccctctgcagtctgttccccaccaggcttccagggggagcctggaaacaacctatgtaggatcctgacgctgtgttcagcaccctcccatggctcccatctctcagattaaagctggaatccatcctggccgcacctgtggggctttgcacaccagcctccaaagccccctgccctcttgctcctcacctcctccttgcttttttatttttatttttttgagacagagtcttgctctgtcgcccaggctggagtgcagtggtgcgatctcagctcactgcagtctcaacctcctgggttcaagcaattctcctgcctcagcctcccaagtagctgggaccacaggcacgcgccatcacacctggctaatttttttgtatttttagtagagatggggtttcaccatgttggccaggctggtcttgaactcctgacctcaggtgatctgcccgccttggcctcccaaagtgctgggattacaggtgtgagccactgcgcccagccttactcactttctgaaacagattagagcctccctccacgatgactgttccctctgcccaggaggccgttcttggccaactgcttgtctcacccctcacccccttcaggtctgttcagacatccagttcccagagaggctcccccaaccattgtaagcgacagccagccgtttctgcacactcaccttgcctgcctatcttcctgttatatttttcacggcagagctccccacccctccacctgtgtctatataaggtctgtcctcactcaaacgtcaggctccaggaagccaggactctgtcttgctcctggctgtcgtacagcagattctcaacgaaccttgcttgaatggcagcatgggcaaccaggacactttgccctcgagccctgctggtggcatccacagctctccatcttcctgcaaacactccgggccagcgcctccccagacgcacccctgaacagaacacctccacccggggcgatgaggtttctttgaagagagctttcatgtgccccaaccttggattccccccatttttagggcacgtaggcctttcatactttactgacagcctgggtgtaaccagtaggagtgactattattgtgggaggtacttaaacatcttggtcaaatagggcttttcccattgtgggggtgtgggggcacccaataaatagagcttcatccagatgcttctatgagtacacggcagttcctaacgagctccgcgtcctcaaatcccagcttcccttttggtctctttcgcatctttcctcataatctccattcactttcacaaaacctcaacctggacccctaaggacacttccgtttccccaagtctgaattattccacctgaagctctccaacctgtattattaatagaattcttggctgggcgtggtggctcacgcctgtcatcccagcactttgggaggctgaggtgggcggatcacgaggtcaagagatcagagatcgaggccatcctggccaacatggtgaaactccatctctactaaaaaaaatacaaaaatattagctgggcgtggtggcgcacccctgtagtcccagctacttgggaggctgaggcaggagaatcgcttgaacccgggaggcagaggttgcagtgagctgagatcatgatactgcactccagcctaggagacagagcgagactccgtctcaaaaaaaaaaaaaaaaaattctcaggagaaactgtttaagacgcagataactatgtacaaccccgaagagatcctgaatcagcaggtagagccacgaaatggtaccttgaacagattccaagtgactgatgtagtggccaccctggttcaggagttcctggggaggggcaggggagggccagaagaaaactatatttttagctaaaagacctcagcttctggcttggcatggtggcttacacctgtaatcccaacgctttgggaggccgaggtgggcagatcacttgagcccaggaggtagaggctgcagtgggctgagactgtgccactgcactcccacctgggtgacagagcgaaactccatctcaaaaaaaaaaaaaaaaaaagaccttggcttctgtgtgagggaataggaagggagggaaaggttttcattttccagctgtttataaaaaaataaactggtactttgaggtaatttgcgtcaccagatacctattctagaaaccccaagatctgtgggacatccttccacatcagtggaaagccattcgcaaagaggacaaacggcttcttctctcatggatcattaacaattctcaaagcttgaacccgtatctgataaccagtcacatctggctgggggcactgtttgaggaaaggggaaccctttcctcaaatttaatagtccatgcaatcctcacctacaagagacttaacaggacacttaatttgctaaactttattttatacatacacgtttacatttactagtcatggtgtcaacttgttaacacaacgaagccctaatggacccgttttgaaattagaagctggacagttacaggctttggtctcttcaagaatccaattcacccctgggtttcgcttggcacacaccccaggagaacgtcgatgcacacagctgtgtagctgcaaacggaaaccactctcttttctctcgtatttttcagtcagactcactcaggattttgaaatgaatcatcacgagaaatttgttttaaagttgaatcactgagaacatctaacaactgttcacattctttatcacaaaaactgaagtcggaaaagacgccctgaaaacttgcaagggctaatactctatgatagaatattactactgttcaccatgttaatacatttacttactaccatacacctgaacagtcacggcagaacaagagcatgtgaatgacgaaaggaaacttgctttcagggtgtcagattatagaacatgcacaggaatttcttccacttctaacctcgctcatcagtcacatttacaagaaactcaattttaagcaaagagatgcctgaaataactaagacgtgtacaaaaacaagttaacctatgaacacaaggtaatattctgatagtcttcgatgtgacttccaacatatctgagtagtcacttttcagttttttaaacacgtgagaaaaatagatttggattacatctttgtggacggctacgatacagtttggaaaccattatctcagggaccctgctctctcctctacacatgcgcacgcaaacacacacacacacacacacaatgacacatggtggtctggtctaatatagtgtgtctgaattcagagggcagacattaacagccaagttttgtttttttgagagagagtctcactctgctgcccaggctggagtgccgtggcacaatctcggctcattgcaacctctgcctcctggattcaagcaattcatctgcctcagcctcctgagtagctgggattacaggcgcgcgccaccacgcccagctaatttttgtagagatggggtttcaccatgttggtcaagctggtcttaaacgcctgacctcgtgatcgacctgcctcagcctcccaaagtgctgggattacaggcgtgagccaccgtgcccggccaacagccaagttttaaaagatttttttcccctcttactataatgtgagtagtgaccttctgctgcaaagatggtgacagtttggtgcaaagatggtgacagttgggtagatggatggaattagagctggggacctaggaatgcctgcgtccttccctataatcaccccccttccccacaggattcctgagagggctcatcccaaatgggaatcaaagtgccatttttactaacagactctaaaactcaaagactttgaggtctaggcagacattctttttccctaaaactaactcttgggacctcctggctagataactggaggatggaagctggagactgaaggagcaataaaaccaggtttgcagcgaaggtcctggcttaacttaccccgctggttacacgagaggaaggcgggaggaagaatatggcagggccacccagctcttccaaatgccagggcctgcagaggtcgctgaccattccgaggagggagcaaggcgtgggggagaaaagctgaacatggatgagtgtaacagtgaccctgctcatgcataaaggggaatgaatgttctagaattttcccaatcctcttaccaactctcctgcctccgaagagaaggtgagtagagaaggcggtgaaacggcaggcctggtagagaaaagggcatagagatccacctcccttccccaactccctcccacccaagacctcacctatcgtttacctcagggccagatctctatcaacaggggccctaagagagtccaaagtcttattcagtgacaagagagaacttggttgacttggtacttcttccttgttctttcaactcctcagtatgggtggtcccccagatcaaacctttctggattctgcaaataaatgagagaacagatcaagaagggaagcagagaggtgtcattaggaaatgcattacttccaagaaatttctgggtccctgaacatttctattccccagccaggtctctagaaaacttcacccttaaagccacataccctgcaaacaccataactccaaagtattaatattttttttggggggaggggggaacagggtttcactctatcgcccaggctggagtgcagcagtgtgatcttggctccctgcaacctccacctcccaggttcagggagggtaagagcccagaccgcccttccaggagcccctgaaggccgatgctggagacatctggtgggcagatgtctggaggccaatcccaggccttggcctccccagtagctgggattacaggcacaaaccaccatgcccagctaatttttgtatttttagtagagatggggtttcaccatgttggccaggctggtctcgaactcctgacctcaggtgatctgtctgccttggcctcccaaatcattaaattcttttttttttttttggagacaagagtctcactctcgtcacccaggctggagggcagtggcacaatctaggctcactgcaacctccacctcccgggttcaagagattctcctgcctcagcctcccgagtagctgggattacaggtatgtggcaccacacccggctaattttttgtatttttagtagagacggggtttcaccatgttggccaggctggtcttgaactcctgacctcaggcgatctgcccaccttggcttcccaaagtgctgggattacaggcatgagccaccaagcctgggcccaaaccattaaattctcatcaaggaagatgggtcagatggagtggcaaatgaccacagtgacactcattgtgggtttcctctgccacctcctgcccaccagatgtctccagcatcggccttcaggggctcctggaagggcggtctgggctcttaccctcctcaactggtgtgtcatccacctcctgccatgcaccagggtcctcctcatcacccgcttgacccaccacctcctcgggctcctctgccccacctgccactcctgctcctcctgcctcatccacttgctggcacgagcccagtcacttctgctatcattctcaccattggtggcacgccgaggagagccttctggcttggccttcggacccctagaggttgaggctgttgcctcggcaggctgctggccccgaggggccttctgatctgatgcctcccttcttgagcctggccctttctttggcatcaccggcttcttcctgccatcttctgagtcaaccaagacgtaggagacagggcccaagctcaccttcttcttcttcctcatgggagcggggttcttggcagacacccaggccacggccttcttctttggtgggctttcatggccaccatcttggtctgactcagaggcgcctcctgggctctcggcttctgcccgggcatcctgaggtggctctctgggacccttccaggcacatttcgccatgggcttcttcaaagccaactcctccttattcacacagggctttctgctgcccttgatcggctctgagatcgccatgctttcagcatcacccacctcaggatcctccaagttagctgtgctgttggaattgatgcctttgggttttttccagggcactgcttcctgcctggagttcttcttctgcttctttctcctggagcgagacttagctccagccctgcgaaccaaaggtttggtaggctcatgctggtcttccgtggcattccagttgttgggggtctctgcctttaaggcagaacccacctctgctgcaagccccggttctttcttcaccttcctccctgctgctaaagcccaggctgccatctcctcgaattcagcggcctcctgggccctggcttcctcccggctgcggatctcggcatccatgcagaagatgatctgcaccactgctcccagaagcacccccagagcttctgcccagttctctgggggctgatgctggttctgggacagggtggggtggttgagctggagcaggcggaccacatcctcccaggtgcgcccctcggcatccaggaattcattcagattttttaaaaactcggcatcctgggtagggtctctacagaccactctccagacaccaccccttcctgggaattcacgggggatggtgctcagattcacaccttcaccaacctcaatgagggcagctttaacattctcttccctcacaaaaatcttgttgagcacgcggtacgggcccagtggggagaggaccccattcaaggtctcctcaatttctgcctgcccacagtcctctgggatgcctgtgaccaacaaggacctgtggatgtccacttccattcccctgcaccaatcctccagaaggttcatcgccatggtcttggacatttagcggctctgaacctactatgtgtagtaaatagtctatcaggtggacgtgggctgcagcggtctccaaacagtaatcctgcaaggtgacaagggagcgaggtcacgttcccaggaagatgaccaagctcacagatcctagctgccccctccgcggctggcctgcaggaggcctggcgctttcccaacaccctcctccccaacccaggccccggtgctcacacgtgtccctgaatctgcagcaaaaggccctaggaccctcccccgggcctgacgctccgcctgcccagccgggacttacttggcagatcagcctccgaccgcccagccaggccaaggagacgcagtggaatgcagccgtttcccagtcgctggctccggctaccccggcgccgctgctagaggcagaaagggccaagaaggcgccgtccgcccccgctccggcccaggcgggtcacggggcgtccagactcgatgccgttagcggcgagaagccgaggttggcgtcgcagcgcgcgcctgcgcactggctcccgcaccgccgctcgggggtcttgggctgcgcaggtgccgacgtctccatggcaaccgggcgtgggttgctagggctgagcccggccggcgcgccggcgctgcaattggacctagggagccgggtgcaagagtggcctgttcaggtcgcagagcaagcgggtctggatacactccggtggcgcctccacggaggccctctttcaacccaagtgggcctcgcgaacgggggttaggtcgatgagaagcgccaacacctatggctgcacccactgactgtattatcctctgccccacctgttggattcacccaacgcaactcttgggagacactagaaatcaagaaaggaggaaaacgaggctttaatcttcttgggttcctccaacagcaggtgcagttcctgttgggcttgtagccttctctcttacaagctgctgggttcttccaggaatttccagaaacttctagaaatttcttagtctcctccccgaccccttctagcatgaggataatgcctcgccttttcttgtttcctcaacgtgattcagggcaggttcttggcatcctccaggcaggggacaatgttacagctcagtgactgcccctacagagaagtgttagtccaaactgcaaccattttgtaagccctgactattttgcagatcttggtcaaagtgaaatattccacgggggttcgggccaatgagaaacatcctgcctaatcacctgaccacaaggcggacaaaggcccagctaaagaaacattatcataccctatcgtgcaaaggcccaactgaagaaacatccctatcatattctgctgggagaaagtgcagagaacaccacattccaccagaacaagggccagaaccgcctcatcatggaaccatcttatcaacatcctgctgggcagcaaaccatactgctcagacccctcccacccataactataagtacccccagcctataagcagcagtgggctctggcattaggctggttacccacttccacaggtgtctgcagtatacctgagttgctgttgagccgccttctgtctgtgtgtctttaaccctcaccttccctccaaaacctaacaaggagggctaccctctaggcagtgtgctgagaatagcacctcggggcaaggctgcagtcacatttatacccacttttaatgacgtgctaattaaggggtgggttttcagaattagcaaattggcagtaacttatgggtgttgccatggcaatggtaaactgtcatggtgctggcaggcatgtcttatggagagaggctttcggtgccttttccaggttttggccagtcttcaatgtgatcctcagtggagtcccctgggcctcctacctcaaccttgctgcccatgagcaagaactttgttaatagtttattaatgcccagtgctgtggctcacgcatgtaatcccaacactttgggaggctgaggagggcggatcacttgagctggggagttcgagaccatcctgggcaacatggcaaaaccccgtccctaccaaaaacgcaaaaaattagccaggtgtgataggggtcacctgtggtctcagctattcgggaggctgaggtgggaggattgcttgaacccaggagaccctgtctcaaaaaaaataaactaattaattaagcactcctatgagactcggttggactggccatctgtttttttttttttttttttgccagtccctcactgatccacctaccaatgtcccttcctggctgtgtgatcttagagaaataatttgaccccgctgagcttatttcttttctctgtaataggaattctaataaaaaatcttcctgatttggaagttttgaagattcggggggatctcatctgaaagatgcatggaagtacaatttgggccttggtattcaaccaaaatctgttctttgggttcatttttgaaactgacatttgcaaggccaaatagccaaatgttcatttcactgtcatctctggcattcctaaatttgggcatcatcaatacttgtgtgattgcccaagtttccatcatattttgtgctaaaaagttgtgtcattcaaatcgttaacctctgattattcacataattcacaccgaatattccaataaacactctagctatgattaaagtctttaaatctcatgtgctttatatgttgaaattctacatatcagtggaagaatgagtgtatatttttaggcagtggtttaaaaacatagccataaattctccgacacttctattgagaagtgacgatctgtgtcccctcctcgtgaatctgagcagacttgtgactactttaaccaatggagtttagtggaaaggaagctatgtggcttctcagactatgttacagaagggcacgcagcttcttcctcattcactggaacactttttttttttcttttttgagacagagtctcgctctgtcgcccaggctggagtgcagtggcgcaatctcggctcactgcaagccccacctcccgggttcacagcattccaggttgggaagaacaatgaacaatttttctgagagatggctaatcacaatcccccatgggcacaatgacctctttctgcatgtagccccctccagcatacccctatgaaacttccagtccctgcctttttgcagacagcccccttctctgctgtgctgcccattgcaaccgtgcaatgtattttcatatcttctctaataaatctgcctttctttacctacaactgtcttggtaaatacctttactgcccacaacacccgccgcacctagtcgtacccgtgacagttgggggtgactcaaatgactgagagctagaatcatctgggagtttcttcactcacatgtctggtgcctgggctgaaatcctttgaaagctgggctcagctgggaaatgttgatggaagcactgatgtggcttgggcttcctcacagcatgaaaaccagagggtagatcgttgaacttcttatttggaagctcaaggatgcaagaacaagagtgttcctgtgaggctgggcgcggtggctcacgtctgtaatcccaccctttgggaggttgaggcgggtggatctggacgtcaggagatcgagaccatcctggctaacatggtgaaaccccgtctctactaaaaatccaaaaaaattagccgggcctggtggcaagctcctgtaatcgcagctactcgggaggctgaggcaggagaatggcctggccaacatggtgagccgaggctgcaccatggcattccagcctgggggacaagagcgagacttcgtctcaaaaaaagaaagagaggccggcgcgggctcacgcctgtaatcccagcactttgggaggccaaggcgggcggatcgtgggtcaggagatcgagaccaccctggctaacatggtgaaaccctgtctctactaaaaatacaacaacaacaacaaaaattagccgggcgtggtggcgggcgcctgtagtcccagctactcaggaggctgaggcaggagaatggcgtgaactcgggaggcagagcttgcagtgagccgagatcacgccactgcactctagcctgggcgacagagcaagactccgtctcaaaaaaaaaaaaaaaaaaaaaagttactctagagaagtatttgggacccccatgggaatgagatgcgtctaccaccgtaacaggagggacctctgcatccaggacatctgggtccaggaacgctagtaggagtgaaggtagaaaaatgaagacgggctgggcacgatggctcacgcctgtaatcccagcactgtgggaggccaaggcaggcagctcacctgagatcaggggttcaagaccagcctgaccaacatggagaaaccctgtgtctactactaatacaaaaattagccgggcatagtggtgcatgcctgtaatcccaggtacttgggaggctaaggcaggagaatcgcttgaacccaggaggcggaggttgcggtgagctgagattgtgccattgcactccagcctgggcaacaagagtgaaactccgtctcacaaacaaaaaaaaaaagtaaattattttttgaaaaataaatataggttaaaatagtgaattttatgttatgtgtattttactacaaaagtgaacaaataatgcgttacagaatggagagatggggggcaagggagggagagagatgccttcagctttgcctcaaaagccaggtttcagctttctgcagagccaatattcctaacagtcctggctgccccttcaggaatgccacccaaccccagtgcatgagcacagaatcaaagttctggaactttctcttcaaagagaaaacaaaacatctcagtgtgtttgaaaattctgctaaggatttgtcagaccaaaaaaaaataataataaaaaaataaaagaagaagaagaaaatcgtcaatctagacaggataaaaagtaaatttataccagcagtggattgtaaaacatcataactaaaatgaaatggaatggatgtttgctgaatctcagaggcttttgctatgtttgccaagtagttttacaaatgcgggagcttgtttgtgatccaggctgcagacaaagttgctgcagtggaaactgagtcacacagtgactcagttagaattagacactgtctgttttttcttctctctttttcagttatttattttggcatgcaagggaatgacagacactgagttttgataaatactggatttttaaatgcaataatcctccaagtgactatctctggggagaagaagagggcaagtcatatgggaggtaggacacagcctatttaaacaataattttgtttaaagatgtgtaaataaatttagcatagtattaagatttaataaagaatggcaagggatacataagggttaattatataaatctctttttttttttttttctgagacagagtcttactctgtcccccaggctggagtgcagtggcgcactcagcctccacctgcagggttcaaacgattctcctaccttagcctcctgagtagccgtgattacaggcacgtgccaccatgctgagctaatttttgtatttttagtagagaaggggtttccccatgttgcccaggctggtctcaaactgctgacctcaagtgatccgcctgcctcggcctcccaaagtgctgggattacagacatgagctgctgagtccagccaataatgctaaaaaaaaaaaaaaaaaaaaaaaaaaggtgtaaataaatttagcatagtattaagatttgatgaagaatggcacgggatgcatgaggattagttatataaatatcaattctttttttttcgagactgagtctcactttgtcacccaggctggagtgcagtggcgcgacctcggctcactgcagcctctgcctcctgggttcaagcagttctcctgcctcaacctctcaagtagctgggattacagggacccgccactatgcctggcaaatttttgtactttgttttgttttgttttgttttaagacggagtctcgctctgtcacccaggctggcttgcagtggcgcgatctcggctcactgtaagctccacctcccgggttcacgccattctcctgcctcagcctcccaaatagctgagactacaggtgcccgccaccacgcccggctaattttttgtatttttagtagagatgaggtttcaccatgttagccaggatggtctcgatcttctgaccccgtgatccgcccgcctcggcctcccaaagtgctaggattacaggcatgagccaccacacccagctttttttcttcttgagacaggatcttgctctatctcccaggctacagtgcagtggcaggatcacaactcactacagactcaacctcctgggcacaagcgagcctcctgcctcagcctcctgagtagctgggaccacaggcatgcaccaccacgcccagctaatttttaaaatttttttgtagggccagggtatcactatgttgggtaagatggtctccaactcctgtctcagcctcccaaagttctggaattataggcatgagccaccgtgcccagtcaattctctattcttgactttgagtttggaatattccacaatttttattttattttattttattttattttattttattttattttattttatgagatggggtctcactctgtcacccaggctggagtgcagtggcttaatcacagctcaccgcagccttcatctcctgggctcaggcagtcctcttgactcagcctcccaggtagctgggactacaggcatgtgccaccacacctggctaattttgcatctttagtagagacagggtttctccatgttagtcaggctggtctcgaactcccgacctcaggtgattcacccgcctcagcctcccaaagtgctgggatgacaggcatgagccactacacctggtttttttttttttttttttttttttttttttttttttgagacagagtcttgctctgtctcctaggctggagtacagtggcgcactgcaacctctgcctcccaggttcaagcaattctcctgcctcagcctctcaagtagctgggactacaggcgtgcaccaccacacctggctaatttttgtacttttagtagagatagggtttcatcatgttggccaggctctcaaactcctgagctcaagtgatcctcccgcctcagcctcccaaagtgctgggattacaggcatgagccatttcattgcatctggccatgtttttgccattactttcaatggcaaaaactgcaattaattttgcctcagcctaaatattataaaggtacaactatgtgtgtatatgtgtgtgtgcgtgtgtgtgtgaagtggagtcagctgcctgcctgctctcccattaaagagccacagtgattgctagctgatttaaaaatagttcaagcacccttaacaggaatcattacagtggtttccatgacaacacgatgtgctgtggtttccaaggcaacaactggcactgtggtttccatgacaaagcatccctgcagccccaaccctcccctccatctctgcacttccagtttagggttctccttccatcctcttccgctgtgtttcacctttgagtttttattttgccctgctgtgtatgttcagtgagaacccacagagtttccataaacactgaacccaaagaaagtccagggggctctgggatcccgcctagatgtttcctcctgagtcagttgcaacaacccatcatggtggttctgtgactcaacctggctggctctgtccaatttgttctgtgagagccccttcttgctgcagagtttccttttttaaattattttttttcttttcttttcttttctttttaattgaggcagaatcttgctctgtcactcaggctggagtgcagtggtgcgatctcagcgaggattacaggtgcatgccaccatgcccggctaatttttgtatttttagcagaggcagggtttcaccatgttgaccaggctggtctcaaactcctgacctcaggtgatctgcccgcctcggcctcccaaagtgctgggattacaggtgtgagctaccatgcctggctttattttctattatatctacgtgtgtgtgtgtctcctaggtcacagcaaaatgtatttcttatcacggatcatgatcaaacacatgtgacagccactgccataggttaattaccgagtcccctatggatggctatgcaggtcgttctctattttccggtctttcaaatgaagagctgagaagggctggtggctgatgccctacagacatctatgttgcttggattcaggtgtgacttcttaacttgtttgaaaatatggccgggcgcggtggctcacccctgtaatcccagcactttgggaggctgaggcgggtggatcacgaggtcaggagatcgaaaccatcctggctaacatggtgaaaccctgtctctactaaaaaaaaaatacaaaaatgtagccggatgtggtggcaggcgcctgtagtcccagctcttcgggaggctgaggcaggagaatggcgtgaacccgggaggcgaagcttgcagtgagccaagattgtgccactgcactccagcttgggcaacggagtgagactccgtctcaaaaaacaaaaaataaataaaatatgatgcttttcaaaagttacagtgtcagctggttgcagtggctcacgcctgtaatcccagcactttgggaggctgaggcgggcagatcacttgaggtcaggagttcgagattagcctgcccaacatggtgaaaccccgtctctactaaaaatgcaaaaattagctaggcatggtggcccatgcatgtaatcccaactactcaggagactcaggagaatcgtttgaacccgggaggtggaggttgcagtgagccaagatcacaccactgtactccagcgtgggtgacagagcaagactctgtctcaaaaaataaaataaaataaatgaaataaaataaaatagcccgagatgggaggattgcttgaggccaagagttcaaggctaggcaacatagggagacacctgccctcccaccaaccctgtgtctatttgtaagataaaaaattaaaaacggccgggtgcagtggctcatgcctgtgatcccagcactttggggggccgaggcgggtggatcatgaggtcaagagatcaagaccatcctggccaacatggtgaaaccccgtctctactaaaaatccaaaaattagccaggcgtggtggcaggcacctgtagtcccagctactcgggaggctgaggcaggagaattgcttgaacctgggatgtggaggttgcaatgagccgagatcgcgccactgcactccagcctggtgacagagcgagactccgtctcaaaaaacaaacaaaacattaagaacataaagtccagtagttttatgccacaatcctagcaactctatcctgggccgttctgagttagctctctctctctctctggaaataaccaataaaaccttaggattatgcggcgggagaagagatgtgttctcctttgagctggggcgggaggcgggggtggtggtcgggttacagccacagctgcaggccctgaatttccttctgacagaaaaaacgccagcagctgtctccactctctacagtgagggaacaacattccaagtgaggaattgtggccaggaaaccgagaggccccatgtccttttcttttcttaatgtattttttctgaaacacacacacacatacattaaaaacaatccaccaataggattacattcatgtaagattcaaacataatcaaatctaccgtgtggagaaattcatagtttgttaataagcatacacgtgtatagaaaaggcagcgtttatcacaaaacaggatgttatttatccctggggcagggagggatttgagatggccagagcacatgaggggcttctgggaggacgatgatttctagatcagatgacagtaacataggacttgctatgtaattatttgccaaattatatatttgtgtttagggcacgtttctggaggcatgttacatattctacaattgtaaaaaaatgtttttttaaaaaacacagctacacattcagggttatagcggtgaaataaatgttatcactatttttttctagaatattctatggctgaaaacctgaacgcagcagtaaaagtacacgtttttaaaacgactcataaaccaaatgcacaaaacacagtcaggtgaagtttctctcatttgttacggaggttggtcgtatttcttcctggtgcctggaagacgtcacgtggtctgaacacagtcttggctggtgatgattcctgatttttgtctgaaatccttggccaaagaaaagaaagagaacaaatgagtctctttatttttttttaaagaaggtttgtatcatatttctcgaattctaaatgtatatttatgtttgacaaaagttataaatatctacttgaagaggtaacacaggagaaaaactggcaagccaaatttaataaacgtaatgaagagtttacattgtgttatgtggagagagatcatattctcttgttatgggcggaatcttatcgtcttgtgggcttggaagatgtcacacaaaggaaataagaatcacatacatttacagacaggcctggccaacatgatgaaaccccatcgctactgaaaatacaaaattagccgggcgtggtggtgggcgcttgtaatcccagctactcgggagactgaggcaggagaaacacttgaacccagaaggcggaggttgcagtgagccgagattgcaccactgcactccagcctgagcgacagagtgagactctgtctcaaaaaaacaaaaacagaacaaaaagaaaaaaagaattacataaatttaagccctaaatgcaaggaaataggttaggtaggacattaggaccgaggggtcaccctaattaggaacagaaacgtatgatccaagagtagagagattttttgccaactgaaacaagatttctgcaggaatgaggccatctttcagggccacccactcaccccggggaaaagtttttagcttagaggttgaagagaaaaatgaatcatttggacatctttcctctttttccctccccttggctaaacccagtatttccattaaaatgctccacgtccatcccaccctacttagtctacttgcttttgttttgtttttttccctagcaccatttatatagacttttttttttttgagacagagcctcgctttgttgcccaggctggagtgcaatggcatgatctcggctcactgcaacctccacctcccgggttcaaatgattctcctgcctcagcctcctcagtagctgggattacaggcacgtgccaccacacctggctaatttttgtatttttagtagagactcggtttcaccatgtcaaccaggctggtctcgaactcctgacctcaggtgatccacctgcctcagcctcccagagtgttgggattacaggcgtgagccaccgagcccagccatagacattctttatctgaccacaaaagtgatgtatgattactgtagaaaaacttgataaatatggggagaaaatcacccatcattctgctgcacatatatcattaccatttcactgtagaacgttttgcttattaaagttagaatattggttttaaggagttcgaggctgcagtgagctgtgattgcaccactgcactccagcttgcacgacagagcaagaccctgactcacacacacacacacacaaaggaatgtcatatcagcagtcagactccctgggtgtcaacacttcctggtggtgtggctttggacaagtaattaattaacttctctgtgcctcagtttcctcatctataaaatggtaactattagactagtaccaaactcataaagaggtgaggcttaaagaagtcaattcaagtaatggtcttagaatggtgcatcacaagtacccaataaatgtaagctataattatcatccatgtgaggatgctgtaaggatgaaatgagttcattcatacaaagtgtttggaacagcccccttggggccaaaataggacaccttgttggctctatgtaaagattcactattaaaattaaggaaaatgttttaattgggggatgcaagagtttcatatctttatttcatatagctacaaacttaaactaaggctagattctaaaaatatgtctgttcattcaaagcacataaaaagatgctcaatatcattcatcatcagagatattattaaaaccatgatgagttgccagcctccttgctttcttttatacacagcaactcaggccagacgcggtggctcatgcctgtaatcccagcactttgggaggctgaggcaggatcacttgaggtcaggagttcaagaccagcctggccaacatgatgaaacaccatctctactaaaaatacaaaacttagctgggcatggtggcatgcgcctgttaattccagctattcaggaggctgaggcaggagaattgctagaacctgggaggcagaggttgcagtgagctgagatcgcaccaatgcaccctagcctggcaacagagaaagactccgtctcaaaaaaaaaaaaaaaaaaaaaaagaaagaaaataagagaaaagatggagaacaacctgaatgtccaataatgggactgattttcaaatatggttcattcacacagtgtaatactacacaattgttaaaaagaaaaaaaaaggcatgaggaagatctcaatgtgctgataaagatgtccaagctacaatgttaagtgaaaaaagcaaagtaaggatcattatgcataggatgctactatttatgtcgaaagtaaggaaaaaatgcacctattcatatatactttatatgcattaaaaatacttggaagtggctgggtgcagtggctcatgcctgttatcccagcactttgcaaaggaggccaaggcaggcggatcacttgaggtcaggagttcaagaccagcctggccaacatggcaaaaccccgtctctactaaaaatacacacgaaaggaccaggcacggtggctcacgcctataatcccagcactttgggaggctgaggtgggtggatcacctgaggtcaggagttcaagaccaacctgaccaacatggtgaaacaccgtctctactacaaatacaaaaattagccaggcatggtggcgtgcacctgtaatcccagctacgtgggaggctgaggcaggagaatcgctagaacccaggaggcggaggttgcagtgagccgatattacaccattgcattccagcctgggggacagggcgagactccatctcaacaaaacaaaacaaaaccaaaaaaaatgcacacaaaaaattcagctgggcatggtgttgtgtgacggtaatcctagctcttcgggaggctgaggcaggaaaattgcttggacccgggaggcggaggtttcagtaagccaagatcgcaccactgcactccagcctggatgacagagcgagactccatctcaaaaaaaaaaaagaacacctacccggtaacagcatctccaccaatcacgccaactctggttttgagcctctgaaatcaagaaactctgctttcaaacagcttatgtgagcttctgtttttggccaggaaaagcctctctttgtcccccctcctcagacgcatctgtggcttgccatagccctgcatcctggattacaatcctttgtgcttactcctgaatacattcctgctatcagaagacatttttctctgatgtcttttttttcaggttgacacaatagatagcttatttctttaccccgtttattgtccttgtctttttaacagaccatcagctctgcgggtggggcctttctatctgttctgctctggtgtgcccccagcttctagaacagggctgtgctgtgttgaattgtgtctctcaaagttcatgtccactcagaatctcagtgaagatgagatcatgccgaattgggttgggctgtagatccaatgactgggtcctagtaagaggaaaggtacaaccaggtgcagtggctcacacctgtaatcccagcactttgggaggcccagacgggcgaaatcaactgaggtcgggaatttgaggccagcctggccaacatggtgaaactccgtctctactaaaaacacaaaaattagctgggtgtggcggtgggaacacctgtaatcccagctacttgggaggcagaggcaggagaatcgcttgaacccaggaggcggaggttgcagtgagccgagatcgtgccactgcactgcagcctgggcaacagagtgagactccgtctcaaaataataataataataacaataaatcctaatacagacacctatgcagatacgtacagaagttgttgggagtatttcattttttatcaaataaaggggaaagggtcatagtgtatgaacttttcttgcatctcactgtgttcactcaaaaggtcccagtggaaactctccagtccgtcctttcaagactgcagaagaacccttgtgtggttggaccatggttcacttggccactctcctatctgtgggcatttgcagggcccgggctgttttgccaacacagtgaagccaccttgatgcttaaaacttgagcccatgccagcctgtggtgtgctagaaatcctcactctttatgaacccaatcatctcgtgcaccacggtggttgtgttgctttacattttgtgtgtattaaagccatcatttgctaaatgtcactgattaaactataccaccgttcagtggtgcggctgaaatgatttgacacatcttcattttctaatgaaccaggagacttttctaaaaagcagactgggccgggtgcggtggctcacgcctgtaatcccagcactttgggaggccgaggtgggtggatcatgaggtcaggagatcaagactatcctggctaagatggtgaaacctcgtctctactaaaaatacaaaaaaattagccaggtgtggtggcgggcgcctgtagtcccagctactctggaggctgaggcagaagaatggcacaaacccgggaggcggagcttgcagtgagccgagattgcgccattgcactccggcctgggccacagagtgagactccgtctcaaaaaaaaaataaaataaaaaattagccaggcgtggtggtgggtgcttgtaatcccagctactcaggaggctgaggcaggagaatttcttgaacctgggaggtggaggttgcagtgagctgagattgcaccattgcactccagcctgggagacaagagcaaaattccgtctcaaaaaaaaagcattcacaaactcctaaacccacaattttaaacaccatgctccaagactcatcagtctagacacacacatgcatacaagcctatgcacaaacacagatcaatacagacacccacactatgtgcagacacatacacctactcatgcacacactcacacattcactcacatagacacggacacccatacacaccctaatggctgaggggtgagcacacacctgtatgcacactgggacactcagacatggattcacatacacacccctaagtgtacacacacacatacactcaagagacacacgtgtcaatcacacacaaggttttgatcctcccaccccctctgagtatccctgacactttgggcaaatctgtctcccactagagtctctgtttcccccttgagtggacatactattttctgcgttccattcccagcatcttcagtgtgacatccagtgaggccccaggggtgcaaggagcccttgggtaacttgagatgagatgcgaacagaggcgtcaatattttcaaatcaagggggtttcaaatggagcctgcagggccagttcccctgaggtagccagttgatgcctctggggtatggtttcaaacgccccagaaaaccagagatttgactccaaatcagccttcatctggaccagtccagccacccctcactgtcactaaagagaaaaatgagaggccacaggtgattccagaacacagacatgaagggaagagatgctaccctgagataggggttgggggaggggggctttctgggtccccctcccaggctcactgggtgtgacaagagaagaggaaatggttagagatgggaggaggggtttggagccccgctgcctgactcccccagcattgccccttgcaagctgtgtgaccttgggctgattacttgacctctcagtgcctccacatcctcatgggaaatggggatcacagcagagctttcctgccagcactgcccaggggactgaagagggtgtgatgtgtttgtgaggtcatctcgtcttatttctgctacgtatcagcggcggccagctcttcactgcacacctcagccctgacagggaccccagggcagcggtgcccaccccggctgcccctggaatgacccagagcccatgtccagcctgcagatctcggcagccgctctcggaatctctgaatggtgcagggcacggctggggcagcaacagtccctaaagctccccggtgattccaagcaatgggcagccggggctcacaaccgcgaccctaggggtcctagagaccatcagacgccacagccgtggttctcaaactagtcccgcatcgcaggcacctgggggtcctttgaaaatgcagcttgctggacctcacccccaaaggggttctgtaggtctagggtgggcccgagaatgtgtatctagttcccaggagacgttgacgcaggtccaggacctgattttgagaaccgctgtcctgcaggaaagtccgctttccccagcctggcgttcaaagaccagggagggttgtccctttaaagcgctggggaaagcgccgtggccccacgattttaaacggcggaactggggtgcctcctggtggaatcagcgggcatcgcaactcgcgcggattcttcccctgctctggagtcgtaggttgcgggggcaaagggaagggtcgtcgtctgcggcgcagttctaggacgtggccacattcccagagtttggggatcgctcatttcccgcttaagcaggccgaggggccaagacaagttcagcctctaggggaaagggtctggaccccgggattcttcgcggtggggaggtggcgggggaggggggagagggaagaggtgagggagggtctggggtctggaccccaggataccttggcctcatccttgggggaggaccattccgtccctcccctggggccgggagggccgattattcgagggagccgtagagtaagacaaacgtgggttccagctcccttccttgcctctctgagcctcggtttctctatctgggaaatgagggtgaaaatctgccttcatcctcttccctccttcatcctgccctcctctctacagagccaataaagacgcacagacatatacattcgaatgtgtccacccccagatccacacagagacacaaacacatacacacacaacctcagcccgccagtcacctggtcagctgaaatcaggctcctgaaaactcttcaaccacttcctgccatccccaccaccctgcgccggtccagccttaggcctgtcccctaggttcccgccccagcctcctcctgctccagccttgcaccctgcacacgacagacctaaagcataaacctctccctctcctgttcaaatccctcccatggctccccagcgcttaacgaggccctgaggccctgccagtctgcacgccctactccagggacctcttcatgctcatttgctgcctcaggtgaaaatccagccagacagcgaccaccatggaggcaggcggccttctttggcgtcactgcctccactccaccagcacttagcctggcatgggaggggcagtaattacacgctaataaccccctacagtcatacccttggcttgggaagcttttgccctggctcttcctacaccccggtcatggacttcccccaggcaaccgccggccgcacgtccttcgggtctttgcaacattcagagaccccgtctctacaaaaaatgcaaaaagtagctaggcttggtggcgcgtgcctgtggtcccagctactctagagggaggctgaagtggtgggaggatcgcttgagcccaggaattcgaggctgcagtgagccgtgatcgcgccactacacttgtcaccttctcagtgagggcttcccaggccactttcccaggcccgtttatgacgactgcaaaccctctcctgccccggccctcctcgggccccctgcttgccggacttttgtcccccagcaggtctcaccccctaatgcatggatttcgtcctcatctagggagcgtaaccccagcctccccaccgcatgctccctgcgggagggtcctgtttcctgcaccaagaacagggcctgggacgcgccagccctggataaatctcatggactgcgcggatggcgctgagggctcctcccagacagtcgccttctctcccaggagggggcaaccgcgctccgctccacccgtcgccagaggctccacgcgcgggacagacccggctgctgcagcctgtgctggtctctgtgcaccgggacccttccctgcaggatctcaaggcctttacgcggctgctccttcgaccccaaacactcctccccatccccgccggagcactccctccaggaatgagggaatgaaaacaatgtttctttccagcacattccccaccaggcctatctgggatctgactcacccagtccgcgtggttcattccgaccgtcagtcattcaacaaataacagccgccgccgcgtgccaggcacggtgttggggctggggacacgaaggggaaaggccaagccacactttttccctacggagctggccctaagccgctctgccgcgcctctccccgccacgcccacctgcccccatgccgcataggtccccacagccaccgctcagggccctctgcaggggctgctgctgctgcaagcccacggggcgctggggggagtttgaaagcaggaggaaagggacgccatttgggggaatgctcaggccgtggtggcagcagcagctggcggtcactgcggtgaaccaggggctcccgggtctctcctcaagcaagccggccccgtgcgtggaacttggcagtcctacactagggctctgatcaccagcctttcccaagtggctcctccagccctcgggagggagcagctccctgcattgctaatattgggacaaaacgatctccctgtttttgcacttcctgattgcaataccccagtcaccaatttcctctattaacctccctgacaagtacagtcggtgtgccagggggcagtcatagctctgaaaaataaagggaggaagtgcagaaagggttccttttttttttttttttttgagacggagtcttgctctgtcacccaggctggagtgcagtggcacgatctcagctcactgcaacctctgcctcccaggttcaagcgattcttctgcctcagcctcccaagtagctgggattacaggtgtgcaccaccacaccagactaatttttatatttttagtagagacggggtttcaccgtcttggccaggctggtcttgaactcctgccctcgtgatccaccctcctcggcctcccaaagtgctgggattacaggcatgagccaccgtgcctggccggccacaaagagttacatttttataggtggtcagggaagccctccctaggaatgtggcatttgaagaaaggtctgagtgacatgaaggttggagccacgcctatagcccaaggaagggcactccaggctgcaggaagagcagtgcaaaggccatgaggcaggaatatgcctggtgtgtcccagagacctgggtggctgaagccacaggagacacagagagggcagtgggaaacaaggcagagggtgagatgggggtggagtgtgtagacctgagctgcgagggagagctgcatgcgatggccatgtcctgcaccagcaccgtgcaatgcggtagccactggccacgtgtggctcttgagcacttgtgacgtggctgggaagactgaggacatgcatgtgtatttttatttaatcttaattacatttaaatccaatttaccccgtgtgattacctagttgaacaaagcatgtctagacagtcctaagaactgcagatatgacggcacaggaaggagaccttgggggatctggggaggcgagggacgcaatcagaccccaggtgtgacttctaagaggacgtctctggcagccatgtatggtggggggacacaggatggagggaggcagaaaactcaggtaggatggaaagctgagtctgaggtccagggcacaggtgaggggtggaggctggggggagagtgcctgcagctgtggcctggcagagtgtatctgggtggaagctagggtggggattggctgggcggggtctccatgggtgtccaggggcttcggagctgaggctggaagtggggaggcatcaggggtgggagtggaagctggctcagatctgcaaggggtgagatgatgctggggggtagggagagccaggcagggatcccgaagcagcaaaggacagtgtatgtaaaccagtgacaggacagttcccaggtattctgggcaaaccacagtcaagaccgtggacatctgtggcccacgctcccacaccccgcctgccccactgcccagagcacagagagagtacagtgctgaatttcactttactggaggatccaggtgacacagggcacagggagagaagcctaggactgctacgggagaagcacacctggggccctccccacccacaggcaacaccacaggctgctgtgcccagctcaaggtacacccagcctggtcctcagtgggtgggtcactgtccagggacagcctccaagcagaggggagcacccacgccctgcagcaggtctcagtcagcttctacatctgggtgtccctgacataggactgggacagtctggtctggactgtgaggtcacacccaaaccctcctattccttcccagggacaagtggggcagggccccctggcacgatgggctcctcactgccagggaatggaaattgggacgaggaagcacacacattgccccagggacaagaaggcatgaatgaaggtggggtcccgtggagactgatatttaggtaaaaatcgagctcagccggggttgcaggagctgaagcatacggcacggcacggcacagactcacatacaactcaagcgtgcttgggacagcaggttgtgaagcctcacagcaccggcccgcctactctggaacctccagggcagggctggggtttcctccccaggtcatttcatcccctgtaaggagggacacgcggccggcttctgcactgcccaggtgagcctctgtccctcacagtgcccttcggggcccctctggcctttaattcactcagggggtgaacccagggactttcaagtcttttagtaagggctgcaaggccagcgctgagcggtgggtcagctccactggagagggggcacccaggggagccacagcctatgggaggggccagggcccactcagcccagaagaaccaaaactggattttaagtgaattaccccaaattgaacacctctgcaaataattagaatgttgggaaacactgcagtctgagtgacaaattcaacttgtggtcaggggcaggtggccttggcctggggctggttcctttgttatcaggggcgccccagtaggcagggctggcatgtgtcttccctctgctcccccctccccctcctcctcctctttcccttctcccaccgttcctctcccctttcctcctcctccccttcccaaccgccttctatctctcagactttcctttctggaatcatctcttcccctggctgggagctggggcctcccctggctgagagttgcgccctgacacgcgctgcgcggctggtgactgagcctccaccacagacccagggcccagtcagactggggtaggggcgacagcggcctacagcacctgccaggcgcaggccccgagagcgccacgaagagccctgctcgcctctgcaggtgcccggcgtccacacacacaccccctccgggggcaacccgggcccccaatcctggtccacttggcgcgtccccatctcggccctgcgctgctgcctcgggcgcccacttctctttcctcctcccatccgggcttcctccgtcgggatcgctggcgcccccggcctgcgagggcccgagaggggaacgtgacgctggcaaaacgcggcccgggcgcgctgtgaagcgaggagattgcgtctgcggaggacaggaagaggggaggggagggcgggggccacaggcgggcgggtgccctgcggggcctgctcgcagcctgggcggcttcttggggggccactagcggcatttagggggcagcctccggccccgacgggccttcttcccgcgcgcggccttggatccagtgggcgcctggcccttggcctcgcctgccctggcatgggccccggcgcccgcgctccccttcttcttcctgcttcctgcggcgtcgtcctgggccgagccccggctcccggctttcttctcgggagtgacgccccggcctcggcctcggccgcccgcgcgggttttgcgggccccggaagcggtgggaggcgcgccggccggagtcaggcccctgggggccgtgcgcgccctcttggcccggggcttcctggatgccctgtcctccggctccgacgcctcgctctcggtgtcctccgactcctcctcggactgttcgtccgaagcctcctccgacccctcgttggaccccatgttctcccgggcggccaggagcgccaatacctcccccagtttgcctttggggtatttgtacttcccgccttcccaggcgttttctttttcctccttcatcacctccgccatgtcctgggcagccaggagcgccaccagctccagaagacccccttcgtcctcacggtgctcgctccagcccccgaagaggccacgcccagccttcttcgcctggggagggagatccggctgcgccaaggtggaaatgcactcccggaggtccccgtcatccccggccttgcgcaggaccacggcgtccacctcgcggcccgcctcttccaccttcacgcgggtcccgttagtgtccttggacatgacggacaagacctgtcggagggggtctcgcttgtctttctcgtcgctccagcccagcgactcgataacagaagcgattttcaacatctcctcccgggcccaggggtccgacgggtcggtataggccacaatggccacgaactcaggattatccaactcctctgtttcttggtccccactttcctgcgagtcgctctccgaagtgtcgctgtccaccggctcctcgtccggggtgtctctcacagccagcagggccactaagtcggggacaccatttttgtcttctttggtgttcaagcggatggattcggccccagctggctccttctctgcctcttctttcttcgatttgtcggtgacggtgaccagagccaagaactcgcggggaccgtcttcttccccctcggagttgcagggcgcccactgcctaaccagctccctggcagcggcctgcagcgtggcgtacagcgcgctctggtcctcttctccgctcaggtcgccctggtcgatctcctcgatcacgatgcccaggctctcgtcggaagagtcctcggcctcactcctcgcgggagcagacggccgtcctcctcggcttctcttcttgcccttctgggtcaacctgttgcgtctggttctgtttctgcgaccccgacggcccctccttgggttcctggctgccccaagaagcgagccagcctgccctgttacctccccagaatcctgggcctgcgtctccgaagcgggaggggtgggtgcctccccgggggtcccagcctccgcggcctgcgtgggcccgtcatccagcagcaggcgtctcatctgcctcaggaccctcgtgtcctgcgcacggtccttccacagaaccctccagaccccatccttgcctgggatctccctgggaatggcagcgtgattgacgtcctccacaaactccaccagggcggcctgggccttctcgttcatcaaagccttcatgtgtcgcaacctgaacgtgcccaggggcaggagggtcggctgcaggacggcttcgacgtctgcctgctccaggccctccgggatgccggtgaccagcagggccctgtgcgcgtccacgtccaggctccggcaccagtcctgcaaaaggctcatggccatggtgcagcccccttggcgctgatcttggggcagcagggagcccgagataggggtgggctgcagcgcacggtgtcaatgcaaccctagaaagccacttgcagggcttagagtcccggttccggtgaatgtggcaaggctggagtggggctcggggctcgggggctctagctgcctgctggccggctggacgcagtgaccttcccccgggacccctctccagagctgtctgaggatccgcggggggcttacgtgtctgctttccaggacagctccctccctctctccctgacacaggcctgagtgactcggcaccgcagccaggtgcaggggggcggcgccgagtgcacctggagaggcgtgggaggtagcagccgcagcttgcctggcgctcgcgccgcgtctgagcgcgcaccctgggcctgaatctcagcagttccgctgcgacgcggctgctcgcgcgtgcgcctgcgcagagggagccgcacaccctcccctgtcccccgcccaaccgtctccatggcaacggtgcagccttgagctggggtctgcgtcgctgtggcctgagacgcttttcttaaaggtcccgatgacaaggacttggggcctggaagcaccactttcattaaccagcaaaaaacaaggccgaaaccacagagggccagaaatcactcaaggatacccgacctcattcaggggatagaggcctccttccagagggtaccggcatcactgggggttacaattcccccttccaggggccaggtggaattcaggattatataggcctaaatcaaagggcactggccttgcagcgtaggaccaggacttactcgggatactggcctcattcacagtatatgggtctcagtatcaaataggggggcccaggcaccacctgtgagcaagacaccattcagggtatatgggcctcacttgcagggtacaggccccactcgatgggaccggccctcactcccatacacgttcctgtattctgaactatgcatgcacaataaatcctgtggttttgcacacgctttgagcatatgtatgattgtgagaccaggcatgaattttgcaagaaagcatttcccttgactgggacagcagactggggcgtgtgaacgtcagtcatagctactgtaaacatgcatttgcttctctgtcccttgttggccatgaggctgtcccctactctatatgaatctggctctgtagaccagctggtaggtttatatctcaaccatcatccctacctcaaagggttttgtttttttgttgttgtttgttttggagatggagtcttgctctgtcactcaggctggagtgcaatggcacaatcttggttcactgcaacttccgcctcccatgttcaagcggttctcctgcctcagcctcctgagtagcaaggatgacaggcctcccaagtagctgggattataggcatacaccatcacgtctggcaagtttttgtattttttgtagagatgggtttttaccatgttacccaggctggtctcaaactcctaacctcaagtgatctgcccgcctcagcctctgaaagtgctgggattacaggattacatggtgagccaccatgcctggcctcaaagggttctcatgaggattaaagggaataatccaggaaagcatttagaagagcagctggcccacagctggtgctccatgaaagatggctaagagaagtatttgttgagaacttaccattataaaagcatctgttttgttggtttgtttttgagatggagtcttgctctgtcgcccaggctggagtgcaatggagcaatctcggctcactgcaacctccaccacccgggttaaagccattctcctgcctcagcctcccgagtaactgggactacaggcatgcaccaccatgcctgactagttttttgtttgtttgtttgtttgagagagagtctcgcactgtcactcaggctggagggcagtggcgtgatcttggttcactgcaacctccgcctcccggcttcaaaccattctccagcctcagcctcccaagtagctgagattacaggtgcccgccaccacgcccagctaattttttgtatttttagtagagacggggtttcactatgttgggcaaccttgtctcaaactcccaacctcgtgatccgcccgcctcggcctcccaaagtgctgggattacaggtgtgagccaccgtgcccggcctagttttgtatttttagtagatggattttcaccatgttggccaggctggtctggaactcctgacctcgggtgatctgccggcgtcggcctcccaaagtgctgggattacaggcacgagccaccgtgctcagcccaaagcatctgttaataaacaaataaataggaaaccaaaacacctcgagttttttgtttttgccaccaggcccaaccccttacttttgtgtttggatttttttatgtttaaggagagtttaactgcaaggttaccacagcaactgggcaaaccgcttactcactcctattttcccccactttttcctcctctgatcttcctgatccacagatggatgtgatgtgactcttttctccagagcagcgttgtccagcaggaatagaatgccagccccaaattcgaaccgcacgtgcaatgttaaaactcctagttgcagccagccaacactgacctcaggtggtccacccacctcagcctcccaaagtgctgggattacaaagtgtcatttttgacatttgaatctccaatctaggctgggcatggtagcgcacgcctgtaatcccagctacttggaggctgaggcaggagaatcacatgaacctgggaggcagaggttgttgcattgagccgagattgcgccactgcactccagcctgggagacagagcaagacgctgtctcaaaaaaaccaaaccaaaccaaaccaaaccaaaccaaaacaaaacaaaaaacgagctgctttttctgcatctattgatctaaaaaaagaagaaatatggtgactcaccatgtaatcctgtaatcccagcactttcagaggctgaggcgggcagatcacttgaggttaggagttcgagaccagcccgggcaacatggtgaaaacctatctctacaaaaaatacaaaatttcctagggggccaccttcaataaatagaaaagagggaagaaaaatgaattttaagaatagattttggccaggcgcagtggctcacgcctgtaatcccagcactttgggaggccgaggcaggcagatcacttgagcccaggagtttgagaccggcctggccaacatggcaaaacctcgtctctacaaaaaatacaaaagttagccaggcttagtgacacacatctgtagtccctgatactcaggaagctgaggtaggaggattgcttcagcccaggagatcaaggctgaagtgagagatgatcatgctacactgcactccagcttgggcaagagaatgaccctgtctcaaaaaaaaaaaaaaaaaaaaaaaaaaaaaaaaaaaaaaaaaggaaaaggaaaaagaaaaagaaaataaagaatatatattatttatcccgaaatatacaaagtgttgtcatttgcacaagttgtcaatgtaaaacaattatttatgagctatcagacactctcttttcataatgagtccctttggagtagccgtatttcaagggctcagcagccacacagggccattgggaatttgtttgcaagaattaattagggggagagagagagagagagagagtgtgtgtgtgtgtgaatacactcagcacaactgttatttataactgcaagattggaaaacacaacaaaaagagaaacaggaagcttgcactttgtgtgtgtgtgtgtgtgtgtgtgtgtgtgtattttagagtcagagtcttgctgtctcccaggctagagtgcagtggcatgaccatggctcactgcagtcttgaactcctggcttcaagcacctctcccacctcagcctccagagtagctggaactgcagcacaccaccacgcctggctaattttattttttgtagagatggggtcttgttatgttgcccaggctggtctcaaactcctgggctcaagtgatcctccttccttggcctcccaaaatgcagggattgcaggcgtgagccatcatgcccgatgaagctgacacttttctaagtcgttgtggataaccacaggtgaaattcttgtaaaaatgaagattcatataccatataacccacccatttaaagtgcacaactcaatggctgttagttcattcagagttgtgtgaccaacaccacgattgattttaaaacattttcatcacctcaaaaagaaatcccacactgcttagccatcaccctccaaccctctaatctccccccagcccccggcaaccactaatctgctttctgtctctacggacttccccattctggacatttcatatgaatggagtcatacaatatgttgttcctttgtgtctggcttctttcactcagcatcatttgttcagtgttgtgtggcaagtgtcatccaatactctgttccatttatttagagacagagtctcgctctgtcacccaggctggggtgcagtggcacaatctcagctcactgcaacctctgcctcccgagttcaaggagttctccgagttcacctgcctcagcctcccgagtagctgggattacaggcacccaccgccacacccagttatttttgtatttttagtacagacagggtttcaccatgttggccaggctggtctcaaactcctgacctcaggagtttgcctgcccatctgcccatctcggtctcctaaagtgctgggatttcaggtgtgagccactgcacccagcctccattctttttatggctgagcaatgttccatggaatggataaatcaaattttctttatccattcatcagttgatggacatttgggttgtttgcacttttgggctatcatgaatatgctaggaacataggagcatgatggatatgctgtgtgcaaatttctatgtagacatatgttttcatttctcttgggcagacacttttaggagaggaatcccggggcacatggtaactctatgttgagtcatttgaggggctgaagggatgcttttagcaatggtcaacgcagagcaagagtctttcctacttcccacaaagccgctgtaagtgctaaaatggagttaggttctggacccagatcattgtagactgatttttcaacagtgtcacaggctggatggcttagataacagaaatctattttctcccagttccagagtctggaagtccaagatcaaagtgccatccgggttagtcttttacatttgcccaataaccaagcaagtcactttgtctcttcatggctctgtggccccagtttatcgtgaggttgtgaggatttaagcgggatgtgtgtgtgtgtgtgtgtgtgtgtgtgtgtgtgtgtgtgtgtgttggaacagtgcctggccctgagtgttactgggacaaagatttcattctcaccgtgggacaggatgaggtggcacgctggaatgcagaggggactccccaggagagcgtctggtttataagaggacccaaaggtacagaggctgaattatgtctctttaaaattcatatgttggagcctgggtgtggtggctcacgcgtgtaatcccatcattctgggaggctgaggcaggtggattgcttgtggtcaggagttcgagaccagcctggccaacatggcgaaaccccatctctactaaaaatacaaaaattagccaggtgtgatggtgagtggctggaatcccagctattcaggaggctgaggcaggagaaccgcttgaacctggaaggcggaggttgcagtgagctgagattgtaccactgaactccagcctgggtgacaggcatgactgtctctaaataaataaataaaataaaataaaataaaataaaataaaataaaataaaataaaattcatatgttgggctgtgtgtggtggctcacacctgtaatcccagcactttgggaggttaaggcaggcagatcacttgaggccaggagttcaagaccagcctgcccaacatggtgaaaccccatctctaccaaaaataccaaaattagctggtcatggccaggcatggtggctcatgcctgtaatcccagcactttgggaggctgaagtgggtggatcatgaggtcaggagatcaagaccatcctggctaacacagtgaaaccccgtctctactaaaaatacgcaaaattagccaggtgtggtggtgggcacctgtagtcccagccacttgggaggctgaggcaggagaatggtgtgaacccgggaggcagagcttgcagtgagccgagattgcgccactgcactccagcctgggcaacagagtgagactcccgtctgaaaaaaaaaaaaagaaaagaaaaattagctggtcatgttggcaggtgcctgtaatcccagctactcaggaggctgaggtgggaggattgcttgggcctgccaggtcgaggctgcagtgagccatgactgagccactgcactccagcctggatgacagagtaagaccctgtctcaaaaaaaaagaaaaaaaaaaaaaaggatagactatgaaccccaagccctgtgcacagaagatcttacagggaccagccaggcagggacatcaggatccccaacatgtcctgcccagtcccgccctgggcatttcccctggaatcatgatctcttcttaggcagagatgagcctatgactgaccaagccactgcctgtaaggttccaatggaaacagctggaagaaagggcgtaaagcgttcaaggccgggcgtggtggctcacgcctgtaatcccagcactttgggagaccgaggcgggtggatcacatgaggccaggagttcaagaccagcctggacaacatggtgaaaccccgtctctactaaaaatacaaaaattagctgggcctgatggcatgcacttggagtcccagcaactcaggagactgaggtgggaggatcgcttgaaaaaattgttcgaaattcttctccccctcattttgtgttcgagaaaaatacaagtgaatctgcttaactggaaatggcgctattggagcaagggttctctttctttgttttcgttttttttttttcgagacggagtctcactctgttgcccaggctggagtgcagtggcgcaatctcagctcactgcaagctccgcctcccgggttcacgccattctcctccctcagcctcccaagtagctgggactacaggtgcctgccaccacatccggctaattttttaatttttttagtagagacggggtttcaccgtgttagccaggatgatctcaatctcctgacctcgtgatccgcccgcctcagcctcccaaagtgctgggattacaggtgtgagccaccgcccccggccagagcaagggttctcaaagtgtggtctggggacctctacgggttgcaaggacattccagggcatccatcagataaaaaccattttcataatactaaaccattatttgtcttttcactcttactctcttaccagtgttcagtggaattttccagaggctacatgccgtgccgtattgcagctgactgaaccaggaggcaggtcaaggattgttgagccagatatcaaagtgagttgaaaaacaccaaaatactacagtgccactcttctcactaactttgttttgttttgggaaatatatctatttttagggctaggcaaggtggctcatacctgttatcccagtactttgggagaccaagacaggaggattgcctgagcccaggagttcgagaccagcctggacaacataaggagaccccatctctacaaaaaatacgagaaaaattagtcagttgtggtggcccatgcctgtaataccagctactggggaggctgaggtaggagaattgcttgaacctgggaggtttgaggctgcagtgaaccatgattgtgccaccgcacttcagcctgggaaacagagtgagaccctgtctcaaaaaaaaaaaacctatttatatatgttatctacatgagtgtgtaacatgtttgttactaggcaggagattttcaggctccagatggccctacttggctggtcaccgttagatcttacgtgcacggggcctggggctcagggtctattcttttctctctctctcgttttttttttttttttttttttgagacagggtcttactctgtcacccaggtggggtgcaatggctcaatcatggctcactatttttgaaagggttaacaaataccatattcttttaatttatcaggagagattcctaatagagtaaatatcgacacatataacccacataaacaaacgctctttagggtccttgataattcttaataatttgagaggtcctgagaccaaatcgttggagaatatacatactcgagaatataacacaatgttccctagggcccaaaacagaaaaaccatatttttcagccgggcgtgtgtgtgcgtgcgtgtgtgtgtgcatgtgtgtgtgtgcgtgtgtgtgtgcatgtgtgtgtgcgtgtgtgtgtgcatgtgtgtgtgtgcgtgtttctccagcaagttacagttgaatcatgggagttaggtgcactgcagactcatctcccatctcccctccgttgtctttctgctcctctcttttcgcctcagagcagtgttgccagggaaaccagatcagcacatcctcaacacaaaatcaatttacctcccgtgtgtctggagggtgacgaatggcaggtctgcctttcaacacgtttacatccaaggagctgtcaactccgcctgcctccacgtcttagaaatgccattttatcttcatccccctctcccattccttttcacttttcattttgtgatggctgtccttttattttcatgtgttcctgcaaaatgtgcattgctgtttgggggcatctaggctaaatttgcataacttgttttccatgatctatctctttttgtttctcatggtttttgtgtgtgtgtgtgtgtgtgtgtgtgtgtgtgtgtgtgtgtgtgtgcggttttctttctttttttttttttttagcactcagcagtaacgtgtctaagattgatcccagttctgtatcttgctggtaatttcacctgctgaatggggctgcatggttgttaaacattgctgcaagttctttaactctgctgagaggtgagatctacctcctctttccttgaagctgaatctgggtgagtttgtgactacctcaactgctagtgtacatccacttgctctgtgtctttcaaggttagctggatgctaggtgacttccaaggttagttataaaaggcttttgcctggttcttctggaataattactgcttggaacttagctgccatgccgtgaggaagcccaactcacatggagagctctgcatgtaggtgctcaagtcaacagctccaactaagtccagtcttcaaatcatctcaaaccaggcaccggacatatgagtgatgaagcttccagatgattccagaccctagccattggggtcatcccagctgtggccccacacattatggggccaaaagaagccatcccctttcataactatggacccatggaatctatgggcataatgagatgttgctgctttatgacactaagtgagggttggtttgttacacagcgaaagtaaccagtgcacacccagatccatctcctgctcccacatacacacagcacaaatactctaccataaatgttcttgtacacattttcttatgatgttgaatgagaatgagacactgagactgcccttggcataggtcccaggagcagaattgcttgggtctgcatattcctttatttatttatttatttttgtcaccgagtgacagtagccatcatggctcacaacagccttgacttcctgcactcaggtgatcctcttgccttagcctcctgggtagctgagactacaggtatgcaccaccacgtcttgcttattttaaaaaaatttttgtagagatagggtctcactatgttgtctgggctggtctcgaactcctgggctcaagcaattctccttcctaagcctctcaaagtgccggattacagcatgggccactgcgcctgactagggtctgcgtattcctaactctaccaagtcctacaagtcactcagtgcaatgaatgtccctatttgctcacatatgaggattcctgtgcccccagtgcccactcccacctctggagattgtccaggcttctaggatttgcccatctcatgggcataaggtggtagctcattgttctccaactacaaatgagtttgcacatctcttttttagtttatttggaaatccccttctttaaatatcctgttcatagtgttttcccattttctcattgctgtttgtgcttttaccaccacaactgttgactttttttttttttttagacagtctcgctctgttgcacaggctggagtgcagtggcactatctcggctcactataagctctgcctcctgggttcacgccgttctcctgcctcagcctcctgagtagctggaactacaggcgcccgccaccacacccggctaattttttgtatttttagtagagacagggtttcactgtgttagccaggatggtctcgatctcctgacctgtgatccgcccgccttggcctcccaaagtgctgggattacaggcgtgagccaccgcacccggctaattgttgacttttttgaacagagcccaatgcaattcctaaaggtattttagctctttctgttgctccaataatatattgttaaatgtgaataacatttctataatacaaagaggatagtataacatggtgctcagtaaatcttgtattgaacagatggaggaagaaaggaaaggaggaattataacatcacacacaccatgccaagggatgatcttatgccagacattggctagaatagcctttaatatattgcttcatttaatcttcaccacagtcatgtaaagccagccccattattatctctatttcccagatgagaaatctgaggctgtgtgtgtgtgcacacacacgcagggtggaaggtcttttacaactgggaagtggtgagacatcaatttgacctcaggtctctgtgactccaaacctctgattcttttgtttgtttgtttgtttgtttttgagatggagtcttgctctgtgagcaggctggagcgcagtcgcgtgatctcggctcactgcaacctccgcctcctgggttcaagtgattctcctgcctcagcctcccaagtagctgggattacagccacctgccaccacgtccagctaacttttgtatttttagtagagacggggtttcaccatgttggccaggatggtctcgatctcttgacctcataatctgcccgctttggcctcccaaagtgctgggattacaggcgtgaaccaccgtgtctggctccaaacctctgattctaacagggatactaggcagactttcagcagcaccatccctcctcagcactcattcattcatttgttcatttaatcatttagcaaacacaaagaacccacacgtgtgggatatgactgtgactacatcagaccagggcctggctgacatcatagggagatcagatatgaaccactaataactacgaattcataatgatgaaaagagtgaataaattacttcacagactttctgtggattttcatgtgatgatgaaaaacagtgagctgggtcccaatgtatttcctggcaactggccatgttctattgttgcagagaagcaagatataggatgaagtgtatcagtgattccattcacactagagcggaccatgaaatatggatttcaaccttagtcaagcctcatcatgttccaccttagaaaatgctaaaaaatgttaacccactatttgcaaaagaaaacaaaaagctgggctgggcgcagtggctcacgcctgtaattccaacactttgggaggccgaggccggtggatcacctgaggtcaggagttcgagactagcctggccaacatggcgaaaccccatctttactaaaaaagcaaaagttagccgggcatgatggtgggtgcctgcaatcccagctacacagggggctgcggcagaagaatcacttaaaccccagaaagtagaggttgcagtgagctgagatcgcaccactgcactccagcctgagcgacagaatgagactctgtctcaaaacacacacacacacacacacacacacacacacacacacacacaaatgaaaaacaataaaagcaagcattcagtaagatgtgacatgcaccaaggaggagacacatgaggtgctgtaggacgagtaatggctctggggggccggaggggttgtgagaaacaaaatcaaggtcccaagggataaaacccactcctggggcggggccccgcggctcacgcctgtaatcccagcactttgggaggccgaggagggcggatcacttgaggtcaggagtttgagaccagcctggcaaacatggtaaaaccccgtcttagtaaaaatacaaaaattagctgggcacggcgcgggcacctgtaatcccagctattcaggaggctgaggcaggagaatcacttgaacccagaaggtggagattgtagtgagccaagatcgtgccactgctgcactccagcctggatgacaagagggaagctccgttaaaacaaaacaaaacaaaacaaaaaaaacaccactcctgggaggaaacagctagtgacccaagttgaccagggtctgctttaagacaaggaatgaagaggtctccaaagaccagagtatcccaggggaccacataaaaaagtctttagtttttcaaatagtttgcatgactggacccttgggacaccggcctgagaaggaaggaattagtcaagagatggacaatgccagaaaaagcttttccttggaaaaagaccctggtttaagttcaagatagcctcatgagtaaagaagcaagacacaaaagtgtacatcttttttttttttgagatgggagttttgctcttgttgcccaggtgggagtgcaatggcacaatctcaactcaccacgacctccgcctcctgggttcaagtaattctgctgcctcagcctcccgagtagctgggattgcaagcatgcacctccatgcctggctaattttgtatttttagtagagacggggtttctccatgttggtcaggctggtctcaaactcccaacttcaggtgatccacccgcctcggcctcccaaagtgctaagattacaggtgtgagccaccgcacttagctaaaagcatacatctttctatgattccatttgtatgacattctaggacaggcaaaactataacctatggtggaaaaaaatcagagcagtgcttgcctctggagttcggggactggctggaaaggaacatgcaggaactttctgggatgatggggtgttcggtattttttttttttttttgagatggagtctcactctgtcacccaggctggagtgcagtggagcgatctcagctcacactgcaacctcagcctcccggcctcaagcaattctcccacctcagcctcctgagtagctgggatgacaggcacaccatcacacccagctaatttttgtatgtttttgtagagacaggcttctgccatgttgcccaagctagtctcaaactcatggactcaagcagtcctcccgcctcggcctcccaaagtactgggattacaggcatgagcccccgtacctggcctgagttctgtattttgacaggcatttggtttttcaggggtatgtatttgtcaaaactcagtgaatttatacctgagatctgtgcattttattgtgtgtattttacattcttctctcaaaagaacaaatattaaaccttagttaatgatatgaagcattaagagggcagtggacagataatctataatttattttgaaatgcacaagaaaagatggcttgatggatatgggatacagccacacctgtgatacagcaggcatgataaaatgtcaatggtagaatctaggaggtggggataggggcgcttgttgtgaaatctttcaactttgctctatgtttgaaagtttttgtaataaagtgttggaaggactgtagtaaaattgttttttgtttgtttgtttgttttgagatagagtcttgctctgtcacctaggctggagtgcagtggcatgatctctgctcactgcaaggttcgcctcctgggttcacgccattctcctgcctcagcctcccaagtagctgggactacaggtgcccaccaccacgcccagctaattttttgtatttttagtagagacggggtttcaccgtattagccaggatggtctcgatctcctgacctcgtgatccgcccgcctcggcctcccaaagtgctgggattacaggcatgagccacagcgcccagcctgtagtaaaattgtttaaaaagatgatactgggccgggcacggtggctcacgcctgtaatcccagcactttgggaggccaaggcagttggatcgtctgaggtcaggagttcgagaccaacctggccaacatggtgaaaccccatctctactaaaaatacaaaaattagccaggcatggtggtgggagcctgtaatcccagcaacttgggaggctgaggcaggagaattgcttgaacctgggagacggaggttgcagtgagctgagatcatgccactgctctccaccctgggctacagagcaagactccgtctcaaaaaaaaaaaaaaaaaagatgatactgggtaccaagagggtgggggctggcaccatggggatctgagtattagggagaggagaccaagttcagttactgcagggaaaaatgcttattgagcatctactgtgtgccaaaccatgttctaggtactggggacatagcatcaaacaaaacacaaaaatccctgccctcatggaactgatgtcacaggtgacatggataagtgataaaatatatatatatatatatatatatatatatatatatatatatatatatatatatatatatatatatagtggctgggcacagtgactcatgcctgtaatcccagcactttgcgaggccaaggtgggcagatcacttgagcccaggagttcaaaaccagcctgggcaacatggtgaaaccccatctctactaaacaatacaaaaattagctgggcctggtggcacacacctgtagccccatctactcaggaggctgaggtgggagaatagcttgagccgaggaggtcaaggctgcagtgagccaagattgcaccactgcactccagccctggggacagagcggggctctgtctgtctctctctctctctctatatatatatatgtgtgtgtgtgtgtgtgtgtgtgtgtgtgtatacgtgtatatatatatatacacacgtatatatgtatgtgtatatatatatatatatatatttgaagaaataaactacataacatgtcaagtgtaagtgccaaggtaatattaacatggtgtaaagtgggtgcaggggtgctcaaagaggatctcagtgagaaggtgacacaggagcagagagcagaaggaactgaggggcaagacatggggagacaaggtacagtgtgcagtaagtactaaggcacttaggggagcttggcccattggagagtcaaaagaacaatgcaggaatgggaggcattcagggccctactgctctgataaaaacgtttcgttttgctgtgggtgagatgggagccatgggttggttttgagttttcgtgtggatgttatctattgcaataaaacatgccacccccaaaactttgtgggttaaagcagtggcagtatattttttctcttgattttgcaatcaggactgggttcagctggctggttcttctgcttgatgggcttccattagggtagggatgtccaagatggttccttcacttaagatgtctggcacctcggatgggatgattctaatggctggggactgtctggcatctctttcttcacacagcctgtccacatggctgacttgggcttcctcataccatggcaggatcacaggggtcaggcttcttacatggtgttaaagcaaactaaatatggcccgagaaggattctatacttctatttttgagtccttgtggacaagctataacctagcttaataggcagacaagatcgaaaacctaattcaaactgtgttcaaataaggcaaacaccaacatgtaaccaatcctgctgtttctgtacctcactgctgatttttgtatgtcacttcccgtttttgtgtgtgtgtgtgtgtgttttggcgatggagtcttgcactgtcgccaggctgtagtgcagtggcgcgatctcagctcactgcaacctccgcctcccaggttcaaggattctcctgcctcagcctcctgagtagctgggactacaggcatgcaccaccacgcccagctaatttttttatttttagtagagatggagtttcaccatgttggccaggatggtctccacctcttgacctcgtgatccacccgccttggccttccaaagtgctgggattacaggtgtgagccactgcgcccagccacttccctttttttttaatctataaatttgttctgaccaggaggcatccctggagtctctctgaatctgctgtgattctgggggctgcccaattcacaaattgttcattgttcaattaaactttaaatttaattcagctgaagttttaaacaatggcggctggcttctaacagggaggcggtgaatcctgccatgtctcttaagggctacacctggaacttgtatcacatcatttgtgctgaattctattggtccaaccaagtcgtaaggctagcccagattcaagctgaggagaaagagatcccatctcttgatgggaaaggtagtgggctcatagggcaggagaactgatagcaatcgtcttggataccatgccccacagtgtgccctgtggcaacagctggcagagaaaagacctgaagagtctaaatctgtgtttctctggaatggacacaaccatctctgcccctgggacgccacaagagcatcagccaagggctcagctatgagatgggcacttttgtaatccagagatggcagcaacaatattcattatttttaactcaaggaggattaaattcagttcccaaattcatggttatggtttcagacaacaggattttcttttttattttattttattttattttttgaggtggagtctcactctgtcacccaggctggagggcagtggtgtgatcttggcttactgcaacctctgcctctcgggttcaagcaattctcctgactcagcctcctaagtagctgggattacaggcacatgccaccacgcccaactaatttttctatttttagtagagacagggtttcgccatgttggtcaggctgatctcaaactcctgacctcaagtgatccacccgccttggcctcccaaagtgctgggattacaagcatgagccaccgcacccagcccagacagcaggatttttgatgaaatcgccccagaaaactggagtcttgactccaaattagcctttaccttcccagggagaggacgagtggggacattattgcttctaaagtggggagctgggggatggggcaggggcatacaagagatggggacagggcttggtgtgggagggatatttgcagtgctgttgcctgggctcaccccacccccagcccctgctgtcacttacaaccttcggctggttaattacctgttggggccttcacttatgtacctgaaaatagggatctcgttctcttagcattgtcatgaaaacctctataagtcagtggttcccaatctggctgcacttttggaatcacttaggggaagatttgcaaaataccgatgccctggctccactcccagggactctgattccgctgttttggggtgtggcctgaagattgggatctttaagcactcccaagtgattctaacatacaagccaggctaaggaccactaggccaagccaccgggccagggcgttctgagccggcgctttagccagcggtcctgcagcgccccctggtggggaacacgagcgcgtcgcctgttgtctgtggaactctccttcctccctcctagccgcgtgtctcgggcgctcctctccctgcttgaaccgccggaggggcttgagcattcagcccctggggatggtgttgtagggaccagcgcgacatcgggtctaacccgcccgagggacaagggggtggcaatcagaggggccgacagaccggggttcgagctcttccccacctctgagcctcagtttcctcatctgagaaatgggatgaaaatttgacttcatgttgctccccagtgtcagccccgggagggtgcctgcccgacttccaccagggggccagaacctgaacaagagtggggacagttaggtgaggaagtgggatatatccaaacgtaaatgttttctatttatttatgtatgtatttagaaacggagtctgcctctgtcgcccaggctggagtgcagtggcctgatctcagctcactgcaagctccgcctcccaggctcaagccatcctctcacctcagcctcctgcccaactggaactacaggcgcgcgccaacacgcaagctaatttttgtattattagtagagacggggtttcaccatgttgggcaggctggtctcgaactcttgacctcaagtgatctgcctgcctcggcctcccaaagtgctgggattataggcatgagctgcccacctggccatgttttccatttaaaatcctcgttttagtttgcaattctctcccacccattctttggttttatgttttcctttcttcacattggtttcatttttgtgtttgtttttactcattttgcatttatttggttttggctacatgagaagctggtgaccctgtatttgggaagtccccaatatgtgaggattatactgaaggtgacacccaaaatttgggagcatgctgaggatgggtccttgcagagactgagggcaggggttgtcgggttcaaggtgtggccgtgggctcctgtcagctagtgtcacagtcacactaataggcacacacctacacacacagacttacacaggtgccaacacactcacaaaacacacaatcatgctcacactcctagtcacattctaacacacacatccagatacaccgacatgttcacacacacttgcacatccagcataccgattcacacacctttgcacacacatatgccacacccactgaaaccctctcacatgtccacacacaccatcaccccgaccctgacacacactcacacacacacactgacacgtcccctcccctagtccacccctaatcctggccacacaaatgcccattctttctccccaggatggggccaaatggtgttttcttggtcatccttggccgacctggcggcctgtcccaggcagccggacttactggaatctctgggctgtggtgtgcacaggagaactccagatggggcccccagtgaggaaggcctgaatgaggtggggcatctggctggagaccatcctttcctcccttagaccacaagagggcgaggccctccctctcctccgagccaggggcttcgccctggtattcccccacccatggccccaccccttatccaggcgcctccttatccccctctcagccctaggtctcccatccccagtcttcccccatcccacccatttcacccatggcagcacaaatttgcccctgttcctccccctgcctggaacctgctatggctccccagtgccctcaagacaacacccagcccttcaccatgtgctccagatctggaaagaaagctctggccaacccttctccctggtttcatccagtctaaagcacgtggactgggtcgggtgtccccttggggttgtcagttctctctcccccactggactttgagtcccaagagggcaggtccagtattgtcatggtcactgctgggtctccagtatggagaaggggctcgagaaggtttattaaacaaaagaaagggccgtgcgccgtggctcacacctataatcccagcactctgtgaggccgaggctggtggattacctgaggtcaggagtttgagaccaccctggccaacatggtgaaaccctgtctctactaaaaatacaaaaaatgagccgggtgtggtggcgcacgcctgtagtcccaactactcgggaggctgaggcaggagaattgcttgaacccaggaggtggagattgcagtgagccaatatcgtgccattgcactccagcctgggtggtgacagagcgagactccgtcttaccaaaaaaaaaaaagaatgaattcacgtaactgtttaaagggtggatgtattttccttttcccagagctgtggctcctcatgcccactagagggcagaaaaaatctagaattcaatgcatctaccatgtgtcctccctccaccaccaaaacgtgccccctccgcccccacctaaggagaaaggaataacaataacaatgtgaataactgctaatatcagccctactgcttgtcagacccctgttaagtgcttcacacacctgatctctaaatcaactgctagatgagacccagccaaggtagaggaggaggaaagcaaggatcagggagggtgtttaattttcccaagtcgcacagcatccaaactgcagataaacttccagctcaagcctctgtgacttcacagctctttgtcctgtttgtggcaaagtttctcaaaagagagagtggtgactgggtgttagaccccttgatgaggatggaggggggcagctcatgcaaagggggcctctagccaggcagccctccccactgccactgcccggggagcctgcacactttaaggcagattcttcatagccttaggggctaacctctgaaagtgtcacagcagcccagggatgcgggttctattattttatccctgtgatacagattaggaaactgaagctcaggaaaattgagggacctgtcctgggtcgcgagacatggaggtggcagaactgagatttaccctgcaaggggccttgccagggcaggacacagagacttcaaatgctaggaggaggaaatggaactccttccccagaagagggaaaagtaactacagggtgagggtctgggagaggagaacaaggacctattttctgatgaggaaagggcaggcttttgtaggtctgtatcccaggtttaggggagcccagggaacctcaaggtcttggaaattcttattttaaaaagaccctgaggtcaggcgccagtggctcgcgcctgtaatcccagcactttgggaggccaaggcaggtggactgcctaagatcaggagtttgagaccagcctggccaacacggcaaaaccctatccctactaaaaatacaaaaattagctgggcatggtggtgcacacctgtagttccaactacttgggaggctgaggcaggagaatcgcttgaacccgggaggtggaagttgcagtgagctgagatcgtgccactgcactccagcctggggtgcaagacacagcaagactctgtctcaaaaaaaaacaaaaacaaaaacaaaacaaaaaacaaaactgaagggtgcagactgaggaagagggaagtaacagtcaaattgtgcatttattagaaaaaacaatctaggtccctttggggaggctggaaaaaatgcccaggtaatagtaagtgaagaaaaaaaaaactggtagaaatatgtacatagaatgagtccattttggttaaataaataaattcataaagctaacatttattgcctcctaagacaggccagggattgtctgaatattttacaagggcttttgtcactaatcccataactctgaacgagtcccattttacaggcacagaggttgcacagagcccaggaatggcaaagtgaggtggcaaaccaaggtcttctgagcccagagcccaggctctcaacccctgtgccctgtgcagatcaccctgaacttgctcaatgtaccagccgtcatttcttcatagcagccccaaataaatacctaactgttcaattcctcatcaggtgaggtctaaacaacccaagtatttatgtcctaagaacttagtagccatggccgggtgcagtggcttggcctgtaatcccagctctttgggaggaaaggcaggcggatcacttcaggtcaggagtttgagaccagcctggccaacatggtgaaacctgggtgtgatggcgggcgcctgtaatcccagctactcaggaggctgaggcaggagaattgtttgaacctgggaggcagaggttgcagtgagccaagactgcaccactgcactctagcctgggtgacagagcaagactccatctcaaaaaaaataataataatacacttttttcaatttatgtgatgaaaatatttgatatgatgaggagacagttttcaaaaacacttttggtagcaccaaaacaaagtttgaagtcctctatcctggggccttgcggcttcttttctttcttttttttttttgagatgaagtctcaccctgttgcccaggctggagtgcaatgctacaatctcggctcactgcaaactctgcctcccgggttcaagcaattctcctgccctagcctccctagtagctgggattacaggagcatgccaccaagcccagctaattttttgtgtgtctttagtagagatggggtttcatcatgttggccaggctggtcttgaactcctgacctcgtgatctgcccgcctcggcctcccaaagtgctgggattacaggcgtgaaccactgtgcccggccgggccttgcattttctataaatgttcttacttagtttaaagcgagacgggagcgcaggacccagtcctgggaggaaatgaagtctcagagggaactggcaggcaaagcttataaagaccacagtgattatgccaaggtcaaggaaagggttggggagggcggggcaggctccaccttttgagcagggcagcggggaactcccccagccatctctgcgccccacagggatactcacacattaacacgcgtgtgtacaatgagactgtctgccatacaaatggcatcgtattctacgcgctgaggactgctgtaacaaactatcacagaatgggtggcttcaatgacagaaattaactttttcacaattctggaggccagaagtccaaaatcaaggtgttggataggttggtgtctcctgaggcctctctccttggctgtgcagacggccgtcttctccctgtatcctcacatggtcttccctctgcatggggctgtgtcctggtccccttttctcataaagacaccagtcaggttggattaagggcccacacatgggacctcattttactttttttttgtttgtttttgaaccaaagtttcgctcttgttgcccaggctggagtgcaatggcatgatctcggctcactgcaacctcctcctccctagttcaaacagttctcctgcctcagcctcccaaggagctgggatcacaggcatatgccgccacgccaggcaaattttgtatttttagtagagatagggtttcaccatgttgggcaggctggtctcgaactcctgacctcaggtatctgcccgcctcagcttcccaaagtgctgggattacagctgtgagccaccaaagcacccggcctcattttaccttaattacctctttaaagacccccatctccaaatacagtcacattcagaggtgctgggagttaagacttcaacatatgaatttggggatggcgatagcatagtatatggtaactctatgttaaacttccagaggaactgtggccacaggtaactctttaacagaaacttgcctgtgttttctttgtactcattctgccttctggagaattcctaggaacccggacaaaggtagttgggcacagtggcacatgactgtagtcaaacctactcaagaggctgagatgaagaatgccttgagccctgtagtttgagtccagcctgggctacacagcaagacccccatctctaaaaaaacaaagacaaagctaacctacaaattgttctcaaatgtaaagacacggaggctgggcatggtggctcacgcctgtaatccccaggccaaggtgggaggattgcttgaggccaagagtttgaaatcagcctgcgcaacatagggagacccatctctataaaaataaaaaaattagccaggtgtggtggtgcatgccttcggtcacagctacttgggatgctgaggtgggaggatcacgtgggcccaggaggttgaggctgcagtgagctgtgatcgtaccactgcacttcagcctgggtgatagagcaagaccctgtctcaaaaaaaaaaaaaaaaaaaaaaaaaaaaaaaaagacatgatagaaatatttaacaattacttgacttgatttactatgaaatatttaatgatgtattagttaactgtgattttgccagtttcttctgtattttgaaactgatactttttttctggttcaaaaatttttggaaggtgcttaagaaataactgttcctccccactgggcctgtggagacctgtagacaaagtactaaagtaactcagcacaaatgtgcaaagtctgtaaatttgggtctttgattttcatagctatgaagagctcagcatgactcttggtggttaagaggcaaattttgctatatttcctcttcctgctgcagctgtactattaataaaatcattctgaacagctttcctgaaatgtaaaaataagccaagatgtctattttgtggatttttttttattatatgtataagcacaggaaaaaacaaatctggtaggacctgcatcaaaaggttagcagggttcctctctgggctgggggcttaagggaggggtgtctgcttcagccatatattgctgttcacaacccgctagagtttaggggcttcaaacaatgacttactagcattcagagggttgactgcgtggttctgctgctggtctctccctcggtcacttgtgtggctaatgtcagctggtaataggctgattctcccccacacagcctctctgcattcacctgggctttcactattttgtaacccagctttagcttccttgcaagatggcagctggcatgcacgtgagtaagagtgggagtctcctggactcttaaggcctaggcttgaaattgacgcatcactctgctacattctattggtcaaaacaagtcacgaggcctgcccagaatggaggggaggggaagtagacccccctggtgatgggaggagtgatgcgtgtgtacagggaagggaggaattgttagtagccatctttgaaggctgctgacctccgtgtctttctttctgtgtttaatagtatgcctagaataataataccacctagaatattatataataatgcctagaatattatagaaaaataatatcagacgtattatttttatgatgatagatatttttttaaataatgcaataaattgtgggaaacttgttggttggaccaagaatctacagaaataagtgaaacctggctggacgcggtgactcatgtctgtaatcccagcactttgagaggctgaggtgggcagatcacttgagatcaggggttcaggaccagccttggccaacatggtgaaaaccgtctctactaaaaatacaaaaattagccaggcatggtggcaggcaattgtaattccagctacttgggacgcagaggtggaagaatcgcttaaacccgggaggcggaggttgcagtgagccgagatcgcgccagccactgcactccagcctggacgatggagcgagactctgtccctgtcccgccccctccaaaaaaaagacacagcaaaagaaaagacacagagaagaagagaaggccagagactggagccaagagacatcaagagcccccagaagctggaggaggcaagaaaggattctcccatagaaccttcagagccaacaaggccctgctggcatctttgttttgaacatctggcctccggaactgtgagaaaataagcgtctgttatttttagccaccaagtttgtgagaatttatgacagcagctctagaaaatgaacacagacatagacagagagagggagactgatctgaatgtagatggagatgtggatatagttgcagatagaggataagctaccaataaggatatagcagcccctatggtgtaggtatagattaggatagagctgtgggcgtagacatggatatagacataaacatcaatgtagacatagatattactgtggatatagacatagaaggagataaaatagaccttgaagggccgggcacggtggctcacgcctgtaatcccagcactttgggaggctgaggtgggcggatcacctgaagttaggagttcgagaccagcctggccaacatggtgaaaccccatctctactaaaaacacaaaaattagccagacgtggtggcccacgcctgtagtcccagctactcgggaggctgaggcaagagaatcacttgaacccgggagacgggggttgcagtgagccaagatcgcaccactgcactccagcctaggcaacagagcaagactccatctcaaaaacaacaaacaaaccgaaaaaacagaccttgaggaaagcttgaggaaggaatggggtcacctgggctaactatgggccattgccaacaggaggtcacagcagatgtcatggagacagcctcctacaaacgctccacagctaagctcttcaggttttctggaaaatcccaagtatcagaaattgctttcttggttgggcacagtggctaatgcctgtaatcccaacaccttgggaggccaagacaggaagattgcttgaggccaggagttcaagaccagcctgggcaacatagcaagacctgtctcttaaaaaaaaaaaaaaaaaaaaaagctttctttcactcctccagtcatcctgctcttttctagtttctggataatcaatttgacccccaaaatgtgaaaacacaattcattgttttcagtcaaaagttgtatttttcttttctttttgagacagagtcttgctctgttgcccagactggagtgcaatggcgtgattatggctcactgtagccttgacctcctggcctgtagtgatcctcccgtgttagtctgccaaggagctgggattacaggtgtgagccagggcacccagacttcagtatgaagttttctctcccttctcttacctttctcatataaatcctgttttgcttttgaacgttgacaacagtcctatgaccatctccctcccctttgcatgccagtgtccaaaacaaaatcagatccaatgaataaatatttaaaagtttgttgtcattaaaaaaaagtggggacagggcacaatccaggagacctcaacccaggtagtaagaagctcagaggcatgttgttacaggatggctgagaaagcaaaaatcaggaagtggtttaacctttacagtgactgtctatacagtggaggtttccagattgcacgggactggttaaaagcaatcctcttatatcatttggggaaggcaacttaagtttcgtttatgattatcagaggcatttgtaagaaataacctaagctggctgggtgcggtggctcacccctgtaatcccagcactttgggagactgaggcagacagatcacttgaggtcaggagtttgagaccagcctgagcaacatggtgaaaccccgtctctactaaaaaaaaaaaaatacaaaatacaaaaattagcagggcgtggtggtgcgtgcctgtaatcccagctacttggcaggctgaagcacaagaattgcttgaaccccggagatggaggctgcagtgagcagagatcatgccactatactccagcctgggtcacagagcaagattccatgaaagaaagaaagaaagaaagaaagagagaaaggaaaggagaaaggaaagaaagggagagagatagccgggcgtggtggctcacgcctgtaatcccagcactttgggaggccaaggtgggcggatcacgaggtcaggagattgagaccatcctggctaacatggtgaaaccccgtctctattaaatatacaaaaaattaggtggcgggcgcctgtagttccagctactcgggaggctgaagcaggagaatggcgtgaacccagaaggcggaacttgcagtgagccgagatcgcaccactgaactccagcctgggcgacagagccagactccatctcagaaaaaaaaaaaaaaaacaagggagagagattgagagagagatcgagatctaagttgagtttcgcttacattcaaaagtcagagtaccttaggttttgcttatgtggcctgattttgtcttcttggggaattctcagtccggatccaccccccctagttttgtgtgtgtgtgtgtgaaacagggtctcgctcggttgcccaggctggagtgaatggcacgatcgcagctcactgtagccttaacctcctgtgctcaggtgatcctgttgcctcagcctcgcaagtagctgggaccacaggcatgcaccactttgtgcagctaatttttttttttttacttttatagagatggagtcttgccatgttgcccaggctggtctcaaactcctgggctcaaggatcctcccaatttggcctcccaaagtgttgagattacaggtgtgagccactgcgcctggctccccccattttattttaacaactttccccttttgacatagcaagctgagggggtaatgaaatcgtatagcattactttctgggagtgctattggctgggacagatgggtgtatagtcatttttgatagctgcatagtcatcttagacatatgtggtagagtccttaggttctccaagttgtctaatgcagatgggtgtcattagttgcatcagtggctgttgagaggcattggaaacccttaagaggatgcaactcccagggaggttaatatcatgactaggaggagaataatatagccaagggttggaaaattcaccagaggagagattcccaggagccaagatgtaaccaactaaataaataaatggaaaaagtatcacctatctgataagatttacatctgttctttaaaatcctctgaagtgtgggcaaaaattcttgatatattaacacagaaatgacagcttcattcattatacctcctttttgggcagttagagtagctcagactcatacattttgtgaaattattgaagcaaggctagaaacctcggtttgtaagccttggaggaaattaacagtgtcattgaagtttttttctaaagttttagagcatttataatagccccttccttccttccttctttttctttttctgtttctgtttttgttttttgatatggagtcttgctctcttgcccaggctggagtgcaggagtgcagtggcatgatcttggaccactgcaacctccccttcctgggttcaagcaattctcctgcctcagcctcccaagtacctaggactacaggtgtgcaccaccacacccagctaattttagtatttttagtagagacgaagtttcaccatgttggccaggctggcattgaactccttacctcaagtgatccacccgcctcggcctcccaaagtgctgggattacaggtgtcagccactgtgcctggcccataatagccttttctaaatcagagacaccaatacaaggaattggagctctgtccaccaaaggaagtcagtgtcatgtgtagtgagagggttggtgcttcttggatttctctaacggtgctatcttctgaacaagtgagccaaggttggtggctttatttgtagagatagtttattgtatctgaatattgggagggattactgccaatccataatgaccacgactcctgtttggtgttggctgttgtggctgcccttctcctgtcattttgctcagtgcccgcgcctggcagtgctgtgatgccatcccagggttcccgggtgcccggtacctgacaggtgcattacctggtaggcgcatttctggtgcagtttcttctggtccttgtaccactgcatgagccccttcatgaaggtgattgtcactttgtcgtcctcaagcttgggtccgctgtactcaccctcgatggctggcatgtgaacaggggagacacgagagtcagcgaccacggccactgtaagggggaagggggtcttgctcccagggatgaggtggacctggctctggacacacagattgagagagggacagagcgagtgaagagtcccctctctggtcaggtctggcccagaggcctcttcctgacctccttctcttccttcacccgcccccctttaccctattcagttttatggcacttagcacgattcattttgtgacttgttcatcatcttatctgcctcctagaatatcagctccatgcggacaggaagggttttgttcatagctgtacccccagtgcctaggacagtgcctggcacataggagatgctcaataatcatctgtgggatgaatggctggaccttctcagcacctagaggtgaaccagacacagcctgtgggggcggggctactgccggcagagagggagggaggagaggatgacagagtggccaagaagccagcatggagaagggcccgggcaggggtgatgctggtgggtagggaaggtgtattagtccattttcacattgctgataaagacatacccgagactgggtaattcataaagaataagaggtttaatggactcacagttccatgtggctgaggaggtctcacaatcatggtggaagatgaaaggcacgtctcatgtgccgacaggcaggagagaatgagaaccaagtgaaaggggaaaccccttataaaaccatcagatctcgtgagacttactcactaccacgagaacagtatgggggaaactgcctccacgattcaattatctcccaccaggtctctcccacaacatgtaggaattatgggagttacaattcaagatgagatttgggtggggatgagatttgggtggggacacagccaagccatatcagcggggtgttgcagctcctgacctcgcccattgggaatcatgagacggagctttgggctgcggatggagcgccctggaacacaggcagaggagcgacagacagcagcctgggggcagaacaaggggctacccttgagcccacccccacccccagggaatggagaaggcccgtgtggaatgttctgggctggagcgtggagcatccaggcctgactcactcatgctctcgatgtccagcgagtccaccacggagcgcttgtgctcgtcgcctgcgatggcccgctcaaaggccttctgcttcacgatcttgttgcactcctggtatttcattttggcatccttgtcgtggggcttcaccttgaccacctgggtgggagggaaggggcgtgcacactgaggccgaggtgggggcacagcggctgtccccaggctgcccagccctggattccatgaacgcggaagtcaggctgcccgggcaccagtgctgatggtgcaaccctggacatgtttaacctccaagtcttggtttctgcaccccaaaactgtccatagctaagctgctcacaccggcacacttcatcaaccttagctataactacattaaaatcaaacaccttgcccgtctgaggaccatgggctcagctcctggtcccccgtgggaaccagtgcaggcagcgacaactccaggcttcccagccttggactccaggacttacgccagctgcccctcaaatcctcaggcctttggcttcggactgagaattacaccgttggcttccccagttctgaggccttcggacttgttctgagccacactccctgcatcccagggtctccagcctgcacacagcctcaggacttctccgcctccataattgaatgagccagttgcccaataaaccccttctcctatctctgtctacacatatcctgttgattctgtctctttggagaactctgattaatatgcttcctctatgaaacaaacagggctgttcctagccatctcccagcccctagggagatgaaacgccatggcatacctggccaccgcagggctcaattaagatgagctgtaattattattattattattactttgagatggagtctcactctgtcactcaggctggagtgtagtggcgcaatcttagctcactgcaacctccatattctgggttcaagcaatcctccttcctcagcctcctgagtggctgggattacaggcgcctgacaccacccccagctaatttttgtatttttagtagagatggaggtttcaccatgttggccaggctgatctggaactcctgacctcctgcccacctcagcctcccaaagtgctgggattataggcatgcgccaccgcacctggccaaggtgagttgtcattattcttcttattgttattcccacagccctggagcctggggctctgtgccttctactgcctgccagacagcgaggggcctgggccagcagggccgttctcctccgtgccagctcagtgccaggcccctctggctgcctgcccagccccaggactcctgagagcctggatccggggtcctggggggtaaggggcccctcccaaaggctgctgttgcccggaactctgacgcagcctcagcagcaacccccaagcaggctgctcccatcccagggaagtccaccttccaccccatcacccagctgagactgagcctcatcctggactcctcccgacccctcagcccccacagcccggcagtcacttcacttcttctgccaagtcggcctcctgaacatctctcagatccagccattcccttctcaccctccagccccacccagccctgacctggcctctcctgcccacgttcctggctcagcctccacctggcctcacagcctcttgtcctgcccttccagaggggtgttcctaaggcacaaacctgaccctgtcctttccctactcggaacctcccagggctcccagagcctcccgcagaaagccctggctctccccacggccctgcgtgatctgctccctgcagcttcatcataacccccacgcacacacactgcagccccactcaccgcctccatgctaggctccgctaacctctggaactttgccaccaggttctttctgcctgaaggccaaaaccatcaaccccctagggagacccccaggcatgcgtccagagacccagcatcccccatccctcgtccactatgtcaccccactgtgagagctgaaaggttgtttctgcccattcagggacagagcctaccccaggaggcccactagattctcaggcccaccagggcccatgagtggcaggacccacactgggggactgggagctgtgaccctctaggctaacggggaactatgggagctctgcctggggacacagggccccaggcctgggccagttcaagagatgagtggctggcagctcccagcagatcaccaggctggggacgaaccctgagggtgagagagactcctctcccaaactaggagtgggctagggtcctggactttgccccaacatccccctcccacgccctgcacgccttcagcccacaccattccacgctttcagcccacgccttctgcggcctccccgtcgggtccagcctcagcctcacccgtcccattcatccacatgacatcgcaaacttgaccctccccctcccttattccaaaattttctctagttccccagtgccccgggaacaagtcgggttcctatgaagccctgtatcccgcagtcccaccttctccccagtgttaagctctactcaggtggggttcctctgcctccccctaccgggctgtaaaccccccgggaaggtaggacctgggctgtttcagtccccatctaggcaggatcagaccctggtgaatgcatgtggagggaagaaagggaaagaaagggaggaagggacagaataagaaggggagggagggtggtgccctttaaaatcaaaacctctggtttcatctttcttccctgaactggctccccacgcccaccagagggcgctctgacccagcaaattcctcatacagcaacagcccgttctacacacaaaagggaattatgaaaataaggattgacaccaataatcgatacttaaagccctactgtgaccagtacctatgctaaattatccacgtgcctaaatcaacacagcaattctgagaatatcttataaatgaggaaagtgaggctcagagaggtcatttaactttcccagtgtcacacagcacataagctgcagagaagcttccagctctggccttggtaaccccacaaccttccgttccttggtcatagcctgacgtgaccaaaccacaatgccctctgtgcctggccctgccacctcctgcccaacccccatcccgaggctcagccacacccttccacccccagctccttagacatcctgttccccatttagtcactggaatcttagcccattggctgcctcgaaagcacttcttccctttccctacccccacctcccacaaatggtcacctcctcccttcagctcaatgtcacctcctctgagtaagcctgtcctgatccagggttagctccatctcttccgactcacctcccctaagaatccaggctttccctgcgctccaggaggcagggcttcagtcatcatcgtgtccccagagccctgcacaggcactacagaaagactgaatgaatgaatggatgagtgaagtctacggggttaaataaatgaacactcaatgagtgacaccctctccctctccctcagccagaaattgagacattctccaacaaacacccacagccaggaagagaagatcccggacccgctagccaagagtgcacgcttcaggctcccaggacccccaaaattcatcctgctgaggctgtcgggggatgctgccaggactctgttggaagccaaggccctagggctcctggagagggtcccatactcccttcagtccctccccaggccaggtacagtgagtctcactaatgccatcatgcctttagggcagagtctcctgctttccagcccagagtccacttccctctcctgaatgattcacctccatttctctccagagaatccccctccccactctccttccaggtgactcctacagggctcacccaatcccctgcccacccaagcctggccagtcagtacgcttcctccctccctggtcactgtgattggggcaggggcaagcacatgatccagttcatccaataggagtcagccctgggtccagggctaaattaatgaatgaaggaaccctagaaccagccatgcctgaagccaaagccacgctggactttttttttttttttttttttttttttttttgagacagagtctcgctccattgcccaggctggagtgctgtggcgcgatctcagctcactgcaagctccgcctcctgggttcacgccattctcctgacgcagcctcccgagtagctgggactacaggcgcctgccaccaggcctggctaattttttgtatttttttttttttttttagtagagacggggtttcaccgtgttggccaggatggtctcaatctcctgacctcgtgatccgcctacttcggcctcccaaagtcctgggattacaggcgtgagccaccgtgcccagccaaccctggtctttatagtaatatgagccaatgaattcctttttcactaacctgcttaaacatggctaacttgggtttctgtacttgggacctaaacagtcctgtgtatcccactcctcaaagcattctctgaggccccaagggaagcagggtggggggtggcttctcagtgtcctgccagtcagtacatctggctccaaatgctggaccaggagttagggggagagggaaagggtcttctggagtttttagaccttggcaccatcatttgccatattcctgagtcttttcaccttgttcctggggctctgggtctcttgtcaacagggaacaagatgacagctgcctggtagagacggtatcaccatccctggagcagatctgtctggaaggcatattctcaatccctgcatttgcaggacagacccaagcttgcacagaggtcagaccagcagcttagtcatggggtgggctgaagatacgaaacagctgatttttctctccattatgttgtccaggtggaagaagggatgaatgaatgaaccctggggctcatcctagggcctggggcttggctcaccatgacagtgttcccagacacggggtgcagcccaggaaagaactgaggccaccctgggggtgctggtgggacagttagcaagacatgaaagggacctcctgggtgtcatgacataataatttgcaggtgtcccaggggttcttcctgaagcccaaagattcccacctccctccaccagcaagtcctcacctgagcaccccgcctacttcccactgcacagcaggctccagcagggtcatggtagcagtggctgcccagaggtcgtggtttttcattttttgttctgttgcccaggctggagtgcagtggcgcgatctcggctcactgcaacctccgcctcccgggttcaaatgattctcctgcctcagtctcccgagtagctgggatcacaggtgcacaccaccatgtctagctaacttttgtattttcttttcttttctttttttaatttttgtgttttcagtagagacagggtttcaccaggttggccacgctggtctcaaactcctgacgtcaagtgatccgcctgcctcggcctcccaaagtgctgggattataggcatgagtcaccgcgctcagccagttgtgattttttactttattttatttatttatttatttatttatttatttatttatttatttatttttgagacagaatttcgcttttgtcatccaagctggagtgcaatggcgcgatctcggctcgttgcaacctccacctcccaggttcaagtgatgctcctgcctcagcctcctgcgtagctgggattacaggctcccaccaccacgcccagctgattttatatttttagtagagatggggtttcatcctgttggtcagactggtctcgaactcctgagcttggatctgcctgccttggcctcccaaagtgctgggattacaggcatgagccaccgtgcccggctggtggtagtttttttacctggatagaatctgtgcccctgcatcaggcccagcccgccgcacaaccttcactcagtctctgtttcacctggcccacactgggtcctaaacatcaaacttaccctagatctggagcctgatgccccagagggaggcccacccagtcccactgactaagcctggctctctgtgtgaggcctgtctcccagagtcacgaaagaccccagtaaacaaacaacatgcatagtctcgttttcagtgggcttcttataacaaaaaatgctctgtccctgcaacagcctgaaaacggttgtcatggaaacagcagtagccaatggaggagggagagacaggcccctcccagagcccaggcctcctgcggtgggtgatggggcacagaagaaccatcaggattaaggggcaacggggaggggggtgtccccatgtggctggagcgggaggagtttcctcatctggtagctctgagagggagccgctgctctcaaagggacccatgagcatccctggagaacagatccatagtctcctgcggatcctcagacagctctggggaggggtcctggggaaaggtcactgtgaacagctggccagcaggcatccaggacgcccgagccctcatccccactccagcattgccacattcactgaaactgggactctaagccctgcgggtggcttgccagggtgtcattgacaccgtgcactgcagtccatccctatctcaggctccctcctgccccaagatcagtgcccagtgggcggcaccatggccatgagccttttgcaggactagtgccaggggcctggacatggacgcgcacagggccctgctggtcaccgggatcctggagggcctggagcaggtggatgttgaagccgtcctgcagtcgaccctcctgcccctgggcacgttcgggctgcaacacatgaagggcttgatggataagaaggcccaggccgccctggtggagtttgtggaggacgtcaatcacgctgccatccccacagaggtcctgggcaaggatgggatctggagggttctgtggaaggaccatgcacaggacacgaggttcctgaggcagatgagacgcctgctgctggatgatgggcccatgcaggccgtggtggctgggacccccggggaggtgcccacccctcccgcttcaaagacccaggctgaggggttgggacagtcatggggaaggccggtgcccctcctggggctacaagcgatagtaacaagaagagtaggggtcacagaaatcgagccggaagctaaaagagggcccgagggacatgtccatttcccttggcaaagaaggaatccaaggaagttccccaggagagcttggacatcaagatcgaggaggcagatgagggggcttgagcagagatgacaatgacagcaggctgtacacagcgctccaggcagcagccagggagcaagttcacaagaagtggaccctctgaagccacaaagacgaggcaggtggtcctatggagttcttggccctgatgaccaggacagacaaagccaaacaggagatgatggaagaaagccctctgatttgatgcacttgaccatcaaagaaggcaggagcagtgactcccatatggtggctcttctggccaccagagacatacctgaatgagatgctgaagggctgtaaagcttcagaaagtgggcgggtgcaaccaccaggtcacagagcggggctggaggaccctgagttcctgactactgcggcctgtaccagcccttcagacaccaaaagctgccaggaggtgttgaaaatcgcttctgaggcggggtgcggtggctcatgcctgtaatctcagcactttgggaggccgaggaaggcagatcacctgaggtcaggagtttgagaccagcctggccaacatggtgaaaccctgtttctactaaaaatacaaaaattagctgggcgtggtcgtgggctcctgtaatcacagctactcaggaggccgaggcaggagaatcactgcagcctgggaggcagagtttgcagtgaaccgagatcgcgccactgtactccagcctgtgcaacagagcaagactccatcaaaaaaaaaaaaaaaaaaaagaaggaaggaaggaaggaaagaaagaaaggaaagaaagaaagaaagaaagaaagaaagaaagaaagaaagaaagaaagaaaaaattgcttctgtgatcgactctttgggctggaggaatgagaaagaaaaaacgatgccctctcgcaggtcttgtctgtcctgtccaaggacactgtggtcccgcggaaagcctgagatgacaggaaccttctggagtgcattttcaccttggcgcagccagaaccccctccctggaggaagaaggctgagcctggcctcctcagggtctggggcgaggattaaaagagacaaaaaggacaaaaagagcgaagtggctcctggagctggtggtgcgcatctggcggctcaggcattgctgcagccgggagcaccacctggggaagagggaaagaggaaaagggtggggaggtgggaaattcaaatacaccaaaggcaaccaagggactacgcagctttccaggctgccagtgaggacataaagtcgggaaaggcagctgcaggggcagcagtagcagagttcgaggacacagagagcaaggcatgggagcctgagggcaaggcgtccaggaagcccctggccaagagggcgcacacggccccccggggcctggtcttcaactgcagacacaagtgattctcccgcctcagcctcccaaagtgctgagatgatagacgcaagccaccgtgaccagtctggtgtccacttcttacttgtcccattccttggtctgaacacttaggttccacccatggtttcgtgtttggctcatctgggcctgctcagcatatgtgaacttcaacctgggggtccatggcaactgaaaaagcaactcaccattttattccacaaagttgaaccggattaggctggttctgaggttacatgaacaacaagttacctgctgtgactgtagtcccaactcactccctaccttggagggctgtcactgtgtttatctcagtaacaaagacccctgaagtcccagtgccttgcaacgattaaggtttcttttcttttttttcttttctttcttttcttttctttcttttttctttttgagatggagtctcactctgtcacccaggctggaatgcagtggcgccatcttggatcactgcaacctctgcctcccggattcaagcgatcctcctgcctcagcctcccaagtagctgggattacaggcccacgccaccacgcccagctaattttttttttttttaagtagagatgaggtttcaccacgttggccaagctggtctcaaattcccgacatcaagtgatctgcccgcctcagcctcccaaagtgttgggattacaggtgtgagccaccatgccaagcctaaaggtttattttcacatacatgttggtagtagtggctgtgggtcaggcagaagggagaccccctgtttggatcttttctgcaggggctcacagcatggccactcatacaacacagaccaatgcaagtcgcaagttgcctctttggggtaagaatgcatcccctcccgcaggggtaccccaagccacatggcgacagtcagggacctatatcctcctacagggaggcagcgaatggaacaacaaaataatctaacacatcgcccgcccccccatcagaggcaacacctcttcccatgtggctgatgagatcttgtctcctccaccagactgtgaccaccgtggggacagattttgttcattgttgtgtccccagtgcttggcatattgtaagaactcaatgaatatgtgttgaatccatgaataaataaacaagtaagtcttgcttttctgtctcatatctgactctccccaacccctctccccaactcaggcttcctagactcaaatcctgaatccactgcttaccacctgtgtgaccttggatagatacttaacttctctgggtctcaatttgtttatttgcaaagtgggaaggatactattttgtgctttatagggttgttattgtaacttatcacacacacacacacacacacacacacacacacacacacacaccctgtgcctggtatgtagagagtcttctataccaattagctgttgtgtttgtttgtttgtttgcagaggagggacagggtatcactctgtcgctcaggctggagtatggcagtgcaatctcagctcactgaaacctctgcctcccaggctaatgtgatcctcccacctcagcctcccaagcagctgagactacaggctcatgccaccacgcctggctaactttttgtctagacataggtctcactacgttacccaggctggtcccccaaactcctggactcaagcaatctgcctgcctcagcctcccaaagtgcgggattacaggcgtgagccacgcagttattgctgctgttgtcactgtggggaagtggccaagggcacaggtttggagccagagggtcctggtctgagtctcactctgccacgtgttatgtttggcctcaactccctgagccttaacgtcctcacctgtaaaactcaacctcaggacattcttgtgaatttcaggcgtgattttttacgcaaagcatttagcatgcccctggtgcgatgtaaacacaagccatagctatgaggatgtaggaacactgtgggaatcctgcgtgtgttgatgactgcgtgtggagcgcccctgctggacaatcacagaacagcacgactgccctgaccggagacctctctaccccagcatcctcaactgtaaaattataataacagtaatgccaatatgagattgaggattcgttgagttaatacatgtaaagtttctcgagtagcatgatgggttaaagatgagtacaaattccttatccttctccccatccagaggtggagtttatagaatgagatggaagtaacattgttactgatgtgggatgtagacttcaagaagactggcagcttctgcttactgactcttagaacacttgctgttgggacactgtccctgagaacccagccaccatgctgcggaagctcaagccacatgcagaggctatgggtagttgctacagttgacagccccagttgaaatcccagccaatagtcaacatcaactggcaggcatgtgagtgccccatcttgggtgttccagctcatcttgggtgttccagcccccatgtgactgcagcccaaccaacattgcaggaagcagggaaaccgtcctgttgagccctgttaacccacagaatcgtaagagacaataaaataattattgggttttttttttttttagataaggtctcactctgtcaccaaggctggagtgcagtggtgcgaccatggctcactgcagcctcgaccgcctggactcaagcgatcctcccacatcaatctcccaggtagctaggactacaggtgtgcatcaccacacctggataatttttctgtacttttttgtagagacagggtttcaccatgttgcccaagctggtcttgaactcctgggctcaagtgatccacctgcctcagcctcccaaattactaagattacaggcgtgagccactgcacctggtcaataattattgtttaaaccacaacattctggggtagtttgttatgcagcaataaagagctgaaacaaataatatctagaacatagtaacaataagctgctattattatgtcattcaatcttcacaacaactctgtaagattgacatcaatagtacctgtattagtctgttttcacactggtgataaagatatacccaagactgggcaatttacaaaagaaagagttttaatggactcacagttccacgtggctggagaggccttacaatgatggtagaaggtaaaagtcacgtctcacatgatggcagacaagagagtgagagccagggaaaaggggttttcccttataaaaccattagatctcgtgagacttattcactaccatgagaacagcatgggggaaaccgcccccatgattccactatctcccactgggtccctgccacaacatgagggaattatgggagctacaattcgagctgagatttgggtggggacaccaccagatcatatcagtacccagttctacagctgtggaaactaagactgcacccttaaccacactgtagcatttgatggaagttgaaggacctaaaatgggtttcttgtgtcaaaagatttagctgagggaatcaaatatatatagatctgtgatttgggcaggaaacagaaacccagaagccttttgggaagcacttcccaggagtataagatacatgcacagccgggtgtggtggctcacgcctgtaatcccagcactttgggaggctgaggtgggtggatcatgaggtcaggagatcgagaccatcctggcgaacaccgtgaaaccccgtctctactaaaaaaaaaaaaattatccgggcatggtggcgggcacctgtagtcccagctacttgggaggctgaagcaggagaatggcgtgaacccggggggcagagctttcagtgaggcgagatcgccactgtactccagcctgggcgacagcgagactccgtctcaaaaaaaaaaaaaaaaaaagatacatgcacttcccatctgtggaaaagttaacagaaaattgtgtgtatgcatggggataagttactcatctactggtggaaattttctttatttattattttatttacttattattattatttgagaaagctggagtgcagtggcttgatcttggctcactgcaacctctgcctcccagattcaagcaattctcctgtctcagccttctgagtagctgggattacaggtgcacgccactacacccggataatttttgtattttttagtagagacagggttttgtcatgttggccaggctggtctcaaactcctgacctcaggtgatccgcctgccttggcctcccaaagtgataggattacaggcatgacccacagcgcctggccagaaaattttttaaaacaagtttcagatacttagattctggcttcgttaaaactatggtttaaggctgggcacagtcggtcacctctataaccccagcactactttgggtggccaaggcgggtggatcacttgaggccaggagtttgagaacagcctgggaaacatggtgaaaccccatctctacaaataaaagaaaaaaaaattaacacacaggtactcttagctacttgagaggctgaggtgggaggatcacctgagcccaggaggttgaggctgcagtgagccgtgatcacgccactgcactccagcctgggcaacagagtaagaccctgtctcaaaaaacaaaacaaagcaaaacaacaaaaactatagttgaagctgttggcagctagttccaaagatattggtgggtgtattagtttgctagggcacatatactgggtggtttaaacaacagaaatctatttactcacaattttggaagctagaatctgagatcacagtgttggcaggattagtttcttctgcagcctctctccttggcttgcagatggccgccttctccctgtgtcttcacgtggtcttccctctgtaccatctgtgtctaaatttcctcttctctctctttttttttttttttttttgagacagagtctcactctgtcgcccaggctggagtgcagtggtgcaatctcggctcactgcagcctccacctcctgggttcaagcgattctcctgcctcatcctcccaagtagctgggactacagtcgcccaccaccacgcctggctaatttttgtatttttagtagagacggggttttgccatggtggccagcctggtctcgaactcctgggctcaggtgatccacctgcctcagcctcccaaagtgctgggattacaggcgtgagccactgcgcccggcctaaatttcctcttcttatgaggacatctgccatgttgggttggtgcccactctaaagacctcattttaacttaattgcctctctaaacgccctttctccaagtatagttatattctgaagtactggaggttaggacttcaacacaggaatttggagggaacacaattaaatttgtcacaatgggaaactcgggactggagggactgtgggcacaggtgtttcccaggcaggcaagggaaggttctaattaggttacaagatggtaaggtccatatgagcagaaacctatgttcgaattgttcacttctatgttcctgaattatactggcactgaggagatgctcagtaaatgtaaactgaatgaatgaaaaaatgaggccgggcgcggtggctcacgcctgtaatcccagcactttgggaggctgaggcgggcggatcatctgaggtcaggagtttgagaccagcctggccaacatggtgaaaccccgtctccactaaaaatatgaaatttagccggacgtggtggcaggagcctgtaatcccagctactcgggaggctgaggcaggagaatcgcttgactccgggaggcagaggttgcagggagctgagatctcaccattgcactccagcctgggtgacaagagtgagactcagtctccaaaaaacaaacaaacaaaaaaaaacaaataaaaacaaagaatggacattggatctatatatatcatgtttatttcctgggtgaattgtaagcaaaaagcttgcctataagacagaatgttaagcccagtggtcttgtgtggattctttctggaatgtaactcttcatcttgagactgtggttcctataaagtttgtttcaagtgtttattatatttaattattgcatttttttgagacagggtctcactccattgcccaggctggagtgcagtggtgcaaacatagctcactgcagccttggcctcctgggcttaagtggtcctcccatctcagattcccagtgttgggattacaggcatgagccaccacgcttagcaaagtcagtgctttcaaacataaaaaaaaaaaagcccgttctctcttgcagctgtataggaaggggttctattctgcatcatgaaattgctctaaataattagttttttcactttaggaggccgaggagggcggatcacttgaagtcaggagtttgagaccagcctggccaacatggtgaaactccatccctactaaaaatacaaaaaaattagccgggcgtggtggcaggcacctatcatccctgctactcgggaggctgaggcaggaaaatcgcttgaacctgggaggcgaagtttgcattgaaccgagatcacgccactgcactccagcctgggtgacagagcaagactctgtctacaaaaaaaaaaaaaaaaaaaaaaaaaatcaattttaatagagtggcacattgagaacataccctaaacattcattctgttctcccgtgcagccaggagctccagttaattttcctgttaccagcctcatttgttaactctgttcatttgtgtctttccttgaaaggataatttgaacaaaagagtctaagatttttttagaaattgttgcaatatctgaaaaaaaaaaaaaagaacctcccaaagaaacctgcattctgattggttgtcttccttgattatttgttgctatggtgaccaggaggttaaatagcatctctgtatttcctaaagaataaatactggttggttttctctggcaaatcagaaaaggatcatttctctccttccatgatcatgatgcaataaaagcctagggctcttctagatttatattttatcaaagaaagtgagagtcttgtcttatccaaattaacagaagcacttagtccagtgtccagtcgcttgagtggcggtggccactctcggaagggcaattacaaactgtactaatagtaagtccagcgcgccatctggtggccaattagagaatagcatgaccgtatctacttaaactaaaaggcgactcacctcccttcttgtctgttaaggctgccctagcaaattaatacaataagcttgttcctgttggtcttagtctgattgagaaagaacccttgactgctttgacccatagaatatgacagatgtgacactgtgctgggcatggcggctcacgcctgtaattccaacaccgagaagcagaggtgggcggatcgcttgatcccaagactgcaagaccaacctgggcaacacagaaagaccccaactctactaaaaataacttttttgttttgttgtgagacggagtttcgctcttgtcgcccaggctggagtgcaatggcgtgatctcggctcaccacagactccgcctcctgggttcaagcgattctcctgcctcagcctcccgagtagctggaatgacaggggtccgccaccgcacgtggctaattttgtatttttagtagagacagggtatatccatgttggtcaggctggtcttgaactcccgacttccacccacctccgcctcccaaactgttgggattacaggcgtgagccaccactcccggccaaaaatataacttttaaaaataggctggcgtggtggcccgcacctgtagtcccagctactcgggaggctgaggcaagaggatcccttgagcctaggaggtagaggctgcggtgagctatgatggcgccgctgcactccagcctgggtgacagaacgagaccctgtctaaacaaacaaacaaacaaacaaacaagtgacaccgccaggcctggatctacattttaagggaaccagcagattccgtcgtgatctctttggctcccaggctactgtgtaagaattgcaactccccagccgggcgcggtggctcacgcctgtaatcccagcactttgggaggccaaggcggcggatcacgaggtcaggagatcgtgaccatcctggctaacacggtgaaaccccgtctctactaaaaatacaaaaattagccgggcgtggtggcaggcgcctgcagtcccagctactcgggagactgaggcaagagaatggtgtgaacccaggaggtggagctttcagtgagcccagatcgcggccactgcactccagcctaggcgacagagcgaaactccgtctcaaataaataaataaataaataataaaaaaagaattgcagctcccctaagagcatggagctgtgagaaggcccaggagaattgaagcttccagacatgggagtgaagaagccatcttggaggtgggtcctccagccctcatcacatgatgccacgtggaacagaaatgaacatccagtcaaacccttttcacattcctgacccacaaaatcctgaacaagcttgggaattaagctattactgtgccattttttgttgttgttgtttttgttttttctttttgttttgttttgggtttttttttttttttttttttttggttttctgggttttatttgagatagagttctgctcttgttgcccaggctggagtgcaatggcactatctcggctcactgcaacctccgcctcctgggttcaagtgattctcctgcctcagcctcctgaatagctgagattacaggtgcccaccaccacgcccggctaatttttgtatttttagtagagacagtgtttcgccacgttggccaggctggtctcaaactcctgacctcaagtgatccgcccacctcggcctcccaaaatgctgggattacaggcgtgagccaccgcctgcggccattgtgccacttttatagaggaggagattgaggttcagaggcccagttgatggtccaagatcacacactgggaagtactggaaccagggttatgaaatcctgtctgcttggctgcaaagcctctactcttccacactgcattatttaggaagacagacaggctttgggcacgagcgtgggcctcactgaggggagaggggccttctggcctcagtaatatccctgttcccttctctgactgtcacttcccccttagagacagagtttctgcagagtggagtctcttctcacgcctgggagagtttgtgcaggagacatgagagctgaagatctggcaccacctttgccttaaagacaaaaggtgacatttgggaaaagcatgccactcttcgagtggtacttaaggatccatgggctgaatctgcctttttttccccaactgatttggcaaggaccttcaaataaatccagtggagcttcttggggcagcatggcccactctcaagagtttagcctttgagtcatgtgtggtggctcgtgcctataatcccagcactttgggaggccgaggcaggctcacttgaggtcaggagttcaagaccaacctagccaacatggtgaaaccccatctctgctaaaaatacaaaaatcagctgggcatggtggcaggcacctgtaatcccagctactcaggaggctgagggaggagaatcgcttgaacccaggaggcagaggtggcagtgaactgagatcgcactactgtactccagcctgggcaacagagcaagactctgtctcaaaaaaaaaaaaaaaaaaaagagagagagagagagaatttagcctttggactcgcacagatctaggttcaaactccagctttgctactgcagcctcagcgcacttatctgtagaatgggatttcaaaatgatgtctgcttctcaaagttgctttgagaatttgctgatattttgtctttaaaatacttcattgtgtgctgccttacacaaagatcagaatctctgaaaggacaggacaggaactttttactcactcactgcttcactcactgctgtatgcccagtgctttcaaaagcacctggggctgggcgcggtggctcatgcctataatcccagcagtttgggaggcagaagagagcagataacctgagatcaggagttcaagaccagcctggccaacatggcaaaaccccgtctctactaaaaatccaaaaaaaaaaaaaattagccaggcatggtggcgcatgcctgtaatcccagctactcaggaggctaaggcatgagaattgcttgaacccgggaagcggaggttgcaatgatccgaaatcaagccactgcactccagcctaggctccatctcataaaaaaaaaataattaaaaacagtaaaaataaataaaaagcactcagcgtgggattttcaataaatagttactgaatgagtaaatcaaaagcagtcaatgttacatatgatgatcagggcattttcagttgcaagcaacagaaatctaagtcaaactggctaaaggagaaacaaaaattcactggccatcttattgtaagacaatagtgtagcttaaacaataaaaacaaattgaattctctttcccatagtagctccggggtgaatgaccttgtgaggctgtgcgtgtggccatcattcaggaacccagattctttcggattgttgcttaaagtgtagtcccgagaccagcagcagcctctggcaattcataggaaatgcacattcccaggttcccccaagacctactaagtcggaagctccgggggcaggacccagaaaactgtgccctaacaaactctccagggaattctgatgcccactttgagagccactgacctcatgctctgtcagcatttgcataattgaatgtgccacctctgagtgacttggtgaaagggaaaaaagagaaagttcagagcaagacatttccttgaaagcaggtaaagtggaaattgcgcaagtcatgtccaactgcaagccactggggaggacccagtcatgtggctgcagccaacctcaagggaggctgggaaatgtagtccccagccaggcagccatgtgcctgaggagaagaggagatgggcttttgctgtccaaaggtttttgtttgtttgtgttaagagacaggacctcactcagttccccaggctggagtgcagtagctgcagcctcaatctcccaggctcaagggagcctcctgtctcagcctctcaagtagctgggactacaggtgcatgccaccatacccagctaatttttgcatttttttagagactaggtctcaacatattgcccaggctggtctcaaactcctgggctccattcacctgggccttccaaagtgcttggatgacaggcatgagccaccactctaagcccctgtccaaagcttaagactgctgcagccatactcctcagggtcccaaagtcttccttgttacctgaaagcagaaataaatagttctgaggtgccagcagttttcatggacacctccccaggtgatatgattaggcttcatgtccccacccaaatctcatcttgaattgtaatcgccataatccccatgagtcaagggagagacagatggagataattgaatcatgggggtggtttcccctatgctattctcatgatagtgagtgagatctaatggttttgtaaggggctctttcccctttactgggcacttctccttcctgccgctttgtgaagaaggtgccttgcttcccctttgccttcagccatgattgtaagtttcctgaggcctccctagccatgtggaactgtgagtcaattacacctctttcctttataaattacccagtctcaggcagttcttcacagcagtgtgaaaacggactaataggccaggcgcagtggctcacgcctgtaatcccagcaggggaggctgaggtgggtggatcatgaggtcagaagttcgagatcagcctggtcaatatggtgaaaccctgtctctactaaaaatacaaaaattagctgggcctggtggcacacacctgtaatcccagttacttgggaggctgaggcaggagaatcacttgaacccaggaggcggaggttgcagtgagctgacatcatgccattgcactccagcctgggcaacagagagagactccatctcaaaaaaaaaaaaaaaaaagaaaggaaaagaaaagaaaatggtctaatacaccagggcacggccaaaagggtccttaaaggttttgctccccagcatcagtttaaccacctggaaacaagaggccagaaattgctgcaggcagggaacagaggtcttatgctatggactgaattgtgtccccttatccccaaaattcatatgttgaagccccaacccccaatacgactgtatctggagataagagtctttaggaggtaattaggttaaataaagtcacaaggtaggatcctaatctgataggactatgaccttataagaagagaaagggccaggtgcagtggttcatgcctgtaaccccagcactttggcaggctgaggctggaggatcacttgagcccaggagttcgagaccagcctgggcaacagagtgagaccccacttctaaaaaaataaaaaatattttttttaaaaagagaagagaaagctgtctccctgaccatgtgaggacatagtgagaaggtggctgtctgcaaaccaagaagacagccctcctcagaacctgaacatgctggcaccctgatctcacatttgcagcctccagaactgtgagaaaacagaattctgttgtttaagccacccagtctgtggtattgtcttacggcactctgagctgacttaagacagtccagaggggagacattgttaggagaagaggcctctaagaaggtgaagagcgtgcctgagacccttcccagtgtagctccggcagtcctcagcctcagtcttccctgggtccttgtggatgacaaagaagcccccatcacaaagaagcaccattgattgggtctgcaaaagacccagtgggactcacaggagctcacatcagggtcactggagtcaagggcctccataccacaggctcaccacatctgggatctcaccactcgcactaaatatgggaataggaaacctcacccagtgtgggtcccaaggagcaggcttctagtctgggaaatcatgtctcttttgatggcactcgcagttcctccttccctggctctagtctacacttattactgtgctctacaaagccctgtgtgtctaactcctgcatagtaatccaagtagcagaaacactttctttttattaaaattcattctcccattcctccctttagtaataagatgattgtggctgcccaattagaaacaacatctgggctggtcatggtggctcatgcctgtaatcccagcactttgggtggccaaggtgggaggattgcttgagcccaggagttcgagaccagccttggcagtgtagcaagaccccatctctaagaaagaaagaaagagagagagagacagagaaagaaaaaaagaaacaaaacacctgccagccttcctgataactaagtaagctcatgcacctaagttcaagcccttatgagctcaagtgatgtgtacagcttctggtcagttcctataaataaagatgctggcccttgactgtcttcctttctccttcctggctggggaacaactacagcaggaacataactaaagagagaagccatttcttaaagatatcaaagccaattcacaagcctgaacaccctcatgaagcaaaagtgtctgcctgccccagaccagccacctacctttggatagagggagagagagagagagaaaaaagttcatcttagttaagccacagtctttcattagctattttcactgtcttaaactctcttttatatttttcttcttttattttctctgtgcctcagtctagatattttctagtggcctgacttccagctcattcatcctgccttctgctgtgtctaatctgttgttaaagcacattgactgaattccttgttattattatttgtataaatttaaggggtgcaagtgcagttttgttacatggatatattgcatagtggtgacatctgggtttttggtgtaatcattacctgaatggtgtacttcgtatccattaagtcatttctcatccctcgccccctaccaccctcccactcttcccagtctattatttcacactctatctgtgtatacacattatttagcttccacttataagtgagaacacggggtatttgactttctgtttctgagttgttccacttaagaaaatggcctctagttccatccatgctgctgcaaaatacatgatttcattcctttttatggctgagtggtattccattgtgtgtgtgcacacatacacaccacacacacacacacacacgcatatataattttctttatccagtcatccattgctggacacttaggttgatttcatatctttgctattgtggatagtgctgctgtaaacatacaagtgcaggtatcttttttcttttttttgagatggagtcttgctctgttgcccaggctggagtgcagtagtgcaatctctgctcactgcaacctctgcctcctgtgttcaagtaattcttgtgtgtcagcctcctgagtagctgggattacaggcacatgcaaccatgcccagctaatctttttgtatttttagtagagacaggatttctccatgttggccaggctggtcttgaacccctgacctcaggtgatcaagtgttggggcctcccaaagtgttgggattataggcatgaggccaccatgcccagctatctttgcctctttgatgtaatgatttattttcctttgggtatataccccatagtggaattgcagggtcgaatggtagttctatttttagttttttgagaaatctccatactgttttctgttttctatagagattgtactaatttacactcccaccaacagtatataagtgttccacttactgaattcttaatttcagttatggtacttttctactctagaattgccctttctctggtaaaattacccatcctttcatataatccctgcatgtttttttcttttgtcttgagcatattaattctagctatgtaagatccttgtctggtaactccaatattaagattatccatgggtctatgtatactatctgttttttctcttgcttttcagtcatttggtctcgcctctagcatgtctagctattgaatgtcaggcattgtacatgaaaaattgtacatactgccccagagaggaaattatctttatgcagatagagtggtgctcatcactttaattcagtcaaaaactgggctgaatctagactgggttgccattttggaaaggcaccatgcatatctagtttgcacttgctcatggattttcaacctggagcctgggttataacctgggggtccatgatcctggcagctcttgaactcttcttgtctcttcagcattgcaagtctgctgaaactctattctgcttttcagaggctttcttcctggcttcttagactctaccccatgtagcttcagagttctgcaatgtcctcaaacaggaaccagaaaatcattaggctctttttaacttctcctttccccaggtcctagtccttcaagtctaattttgtccttcctgctctttgggtgtctgagaaggattcttctgcccaactcttttgcccagatcttcagtctccttccccatacccagaagcatcaaatgccctggagacagaaactgcaaaatgttggctcagctcagctctctatactgttcccccatatttgagattttgttctcttgactcctagttgccttagcagctcaccaatgctttgaaataatcattgctgctttttacatttttaattggcatttcaaattactcctagcagcactattggtctttcataaacaatttcatcatatccagaatcatgggtcattgtattttgaggttttttggtattcatagcttagcctgtaccctgactaacacataacttggcacctggtagtggcactgcagtaacaaaaccctaaaatatgtgacattggcttaacaatcaggcaacaagtaatttaaaatacagatttttggctggtcatggtggctcacacctgtaatcccagcactttgggaggctgaggtgggcagatcacctgaggtcaggagttcaagaccagcctgggcaacatggtgaaactccatctctacaaaaatacaaaaattagccaggcatgatgacaggtgcctgtaatcccagctactcagttgactgaggtgggagaattgcttgaacccggcaggcagaggttgcagtgagcccagatcgcaccattgcactgcagcctgggcgacagagtgagactccatctcaaaaaaaaaaaaaaaaaaccaccaaacaaacaaaaaaacaaacaaacgaacaaacaaacagattttgcaaaccttgtggccaatgacccctatggggctgtgtaaaatcatttggtagaaaaatcatctgcaataacatggaagagagtccacatacttatgaaatctatggtttagggagctgttaaaaaataggattttttattgtagtaaaatatatataacataaaagttgctattttaaccacttttaagtgtgcaattaagtggtattaattgcattcacaatgttgtgaaaccatcaccactatctatttctagaacttttaatcaccccaaacagaactctgtaatcgttacttagggaataatttgttgttataatttttaaattgagatatcattcatctactacaaaattcacctcttttaaagtatacaatttagtgtattttatatattcacaaagttgtgcaaccatcaccacaatctaatgcttgacctttttcattgccctaaaaagaaaccccatacccgttagtaatcactctccattctcttctacccccaggccttggcaacctctaacctactttctgtctatgtagatttgcctattctggatattttataaagatagaatcatacattatgtggccttttgtgtctggcttctttcactgagcataatgttttatgggttcatccatgttgtatcatgcattcaaatttcattcttttattatggccggataacattccattgtatggatatcctaaaatttatttatctattcatcagttgggagacatttaggttatttctattttgggaatcttataaataatactgccctaaacattcatgtatgagtttttgtgtgaacatatgttcttgggtatatatctaggagtggaattgctgggccatatggtaactctatgtttaacttttgaagagctgccaagttggtttccaaagttgctatgccattttacattccccaccagcaatgcaagagaattataattttttccacatcttttccaagacttgttgttgtctgtcatttttattaaagccgtcatagtgggtataaagtatctcattgtgattttgatttgcattttcctaatgactaatgatgttgccttcttttcatgcacttcttgatcatttgtatatcttcttcgaagtaatgtctattcaaattattttcccattttaaattgggattgtttatattttgttgttgttgagttgcaagagttatataatatatatacatatttcttggatgctagactcttactatatatataatttacaaatattttatcctattcagtttgttgtctttttactttcttgatggtacccttcaaagtgtgaaagttttacaatttgatgatgtcccatttatctatttttttctgtagtagtttatgcctttcatgacatatttaagaaaccattgcctagtttaagatcatcaagacctactctatgttttcttctaagattgtatatttttagctgttacaattaggtctttgatttgttttgagttaatttttgtatatggtgtgaggtagggttccagctttattcttttgcttgttgatatccaattatcccagcaccattagttaaaaagactactccttcccccattaaatgatcttggcactcttgttgaaaatcaattgaccatgaatgtgagagttcatttctggaatctcaattctattccattgatctatatgtctgtgggtgaatggtttttaaaaggcaggatattgatgtattctggctacttcctgctgcttttaaaaaatcgtaagtcagaaatgctcccaggcaagaattgaccagttcacaaacaaaaatggacagaagtaaaattcagcaaaggaaagaggcattttctttctttagcctaacatctaaatgtattgtgagtctagaggcttggagtcttacagattgacaaggttactaaacaacaagagagagcctccaagcctttttgagaattgacattaagattttgtggccggaaaaggagaatcagaccagaagcaaaaatctgatttcatatattattgttccattcaagattgttgtttccaatggtctcaaatagctgctataaatatggagtgatcacaggaactatcaatggcttacagacaccttatggaagctcactgcaccatctgtaaagttgtcttgccaaagagtgagatttaaatttgattgagcttctagttctaaatactagtttacaggataaacagggaacagaggaatacattaagaaaccccacatggatgcagtcagcagaattcagaatgtggaaaagctataggagaaaatgacctggtttctccaaaaaataactgcaagaaattaaataatgatccatgctacaatatggatgaacctttaaaacattatgctaagtgaaagaagccagacacagaagcccacatattgtatgatttcatttatatgaaataaccataataggcaaatctgtagaaaaagaagaaactgagtggttgctggggctgccaactggcatgggctttcttttttgggatgatgaaatgttctagaattagataatggcaatagttggacaactctgtgaatatactaaaagccatcaaattgtaacctttaaatggatggattatatgatacatggattttctctaaataaagctatttaaaaatcacaaagaaaaaaagaaggggaggtgtattagttgaatgaaatatatgggctttgttttgatcctgattgaaaatgttttaaaattatgagacaattggacaaatttgaacactgactaaatacttggcgatattaagaaagtacaggccaggtgcagtggctcatgcctgtaatcccaacactttgggaggccaaggtgggaagattgcttgaacccaagaattcgtgaccagcctaagcaacatagcaagaccccatgtccacaaaaaaaaaaaaaaagaagaagaataaattagccaggcatggcagcatacgcctgtaattccagctacttgggaggctgaagtgggagaatcacttgaatcgaggaggtggaggctgcagcgagccgtgatcatgccacagcaccccagcctggggaatggagcaagaccctgtctcaaaaaaaattaagagaaaatatttttagtattgggggggtattgtaatgatattgtaattatgtttttagtagtagttatctcttggagatacatactgaagtgtttacaggttaaatactatgtctgaaatttgttttaaaataatccaatcataagggaaagcaggagtatatagatgaaatgagactgacatatattgacaatcattgaacataagaaggttcattatacattctccctgcttttggacagtttgaaatttcccataacaaaaagaaaaaataaaaatctaaatgcttaagaattatatctggaagagatctttaggggtgggactcataaatggaattgattggaagcaaatagaccaaaaacttaccaagcatttgaggaaattttcttactaaggaaaccataagcctgatctataaaagactaattgctcaatgtctcagagaggtgagttgacttctgaagagtccctgaagacatacagagaggaaatggtgcagaagcaatatcgaaagacataacatctgcaaatgtttcagaactgatgaaagacaccaatccacaaattcaagaagtctttcaaactcaaaataaaataaacacaaaggaaatcaaacacagacacattatagtaaaactcctaaaagacaaaggcaaagagaaaagtcttaaaagcagtcatataaaaaaaagggtagattaccttcaaaagaggaacattattaaagctgacagctgacttctcaatcagaagacaacgaatcatatttttaaagtgctgagaaaaagtaaatgccaacatagaacatatactcagtgaaaataggattatgacatactgtagtgccagcttaaacatactatataagattctttttaactttatggactcaaactaatactgagctatttaatgaataatctttgaacacctggataatgtataagtatgggttaatatataagattttaaaaagaaaatgagaaagaaaaacagactgtatcatgccatctggatgatgggcaaaaacagtaaaactagaatttgatgttttttctgtctttaaaatgacaaagggatcttaaagtattcagtctgctctcagcaaggcatagtaaaaaagttattctttactttctgtgaaatttgtccgggtagcagaggttcttgccttactaaatattcttgtttgagaagatttaacttttttttcctttttgctgaccttagtcatattgttgaattgtttattttttaaaacgtgcagtaaaagattgtcacttacaaaaagctaaattcccttatagttaccttctactttatttatttatttatttatttatttatttatttatttatttatttttgagacagagtttcactctgtcacccaggctggagtccagtggcatgatcttggctcactgcaacctccgcctctcaggttcaagtgactcttctgcctcagtgtccctagtagctgggactacaggcacgcaccaccacgcctggctaattttttgtatttttagtagagacagggttttgccttgttggccaggctggtctcaaactcctgacctcacgtgatccacccacttcagcttaccaaagtgctgggattacaggcatgagccaccgttcctggcctatatttactatttttttttttttttttttgagacaaggtctcactctgtcacccaagctgcagtgcagaggtgcaatcacggctctctgcagccttgaactcccagagccaagtgataatcccacctcagctgggatcacaggcatgcaccaccaatgcccaggtaattaaaaaaaaaaaaaaactgtagagacagagtctccctatgttgcccaggctgaactcaaatgatcctcctgcctcagcctcccaaagagttgggattacgggcatgagccactgtgcctggcctatttttgaatatcttgattgtcattatggttaatagggtagccaagctataattactcctttctcttaggcaattatgcacctattttagtcaagtgatcagtattttggacaattctttttgatgtttcctttcataaaatcagactataaattcagaaaagttaaaaatcatcaagatgtttgtacattcaaaataatctttggcccttcctggatggccaaagcaccaaagatctgttccctcaccttgtaacccaccataggaaatacacacacagggcaggatgctagaactcttaagtatatttgatatgctttttttttttttcaagacagagtctcactctgttgcccaagctggagtactgtggtgtgatcttggctcactgcaatctctgcctcccgggttcaagcgattctcctgcctcagctggagaatgttgcccaggctggtctcgaactcctgggctcaagcaatccacctgcctcggcctctcaaagtgctgggattacaggcgtgaggcaccacgcccagcctatatttgatgtgcttctgtttttaaaatgattctacaatagtgtaaaaacctccctgatttttgaacacacaatgtgaaaaatgctttcaaactaaaaagatgagttcagccttccttagattaattttgtgcattaaatgtcactattataaatatatctcagagactgtccacttttacaggatggtgatgtgtcaatatcttcagtgtccataatctgttcttgcccccaggagaaacattgatctaattctcttggaataattatatagtatgccctaatagagcattctgttttcttcttattagatagtattagtcactgtagtaaattccccatcattatttagtcctacaatcaataagtgacttctgctttcctttcatgctttcctgaaggttagctggaaactacaggccagaaattgggtcttggacaaaggaaagtcaaagtgcctcgatgaatagacaatacctgataccctgagctactgacacttcaagaaataggctcactgggttcaggttttcccatgtgtatgagtctgttttcatgctgctgataaagacatacctgagacatggtgatttataaagaaaaagaggtttagtggacttacagttccacgtggggctggggaggccttccaattatggtggaaggcgaaaggcacatcttacatggcagcaggcaagagagagaacttgtgcaaggaaactcccccttataaaactatcagattggctctctgctcctcccgttcaacagacagccgcatcttcttgtgctttgccagccacgtacgtccctgagacaccacagtgaagttgaagtccggagtcaatggatttgttggaaccgggagcctagtcaccagggctgtttttaactctagtaaagtagatattgttgccatcaatgaccccttcattgacctcaactacatggtctacatgttccagtatgattccacccatggcaaattccatggcaccatcaaggctgagaacgggaagcttgtcatcaatggaaatcccatcaccattttcgaggtgcgagacccctccaaaatcaaatggggcaatgctggtgctgagtccatcatggagtcgaccggcatcttcaccaccaggaagaaggctggggctcgcttgcagggaggagccaaaagggttatcatctctgccccctcttctgacgctcccatgttcgtgatgggcatgaaccacgagaagtatgacaacagcttcaagatcatcagcaatgcctcctgcaccaccaactgcttagtgccccagccaaggtcacccatgacaactttggtatcgtggaaggactcatgaccacagtccacgccattactgccacccagaagactgtggatggcccctccgggaaactgtagcatcatggccgtcggactctccagaatatcatccgtgcctctactggcactgccaaggctgtaggcaaggtcatccttgagctgaatgggaagctcataggcatggccttccatatccccactgccaacgtgttggtcatggacctgacctgccatctgggaaaaccctgccaaatatgatgatgtcaagaaaatgatgaagcaggcattggaggaccccctcaagggcatcctgggccacagtgagcaccaggtcgtctcctctgacttcgacagcgacacccactcttccaccttcaatgctggggctggcattgccctcaacaaccactttgtgaagctcatttcctggtatgacgatgaatttggctacagcaacagtatggtggacctcatggcccacatggcctccaaggagtaagacccccagaccaccagctccagagagagcatgagaggaacagagaggtcctcactgctggggagtccctgccacactcagtcccccaccacactgcgaatctcccctcctcacagtttccatgccgatcccccgaagagggaggggcctagggagccccaccttgtcatgtaccatcaataaagtcctctatgctcagccaaaaaaaagaacaaaaaaaccatcagatctcgtgagacttattcactatcacgagaacagcacaagaaagacctgcccccatgattcaattacctctcaccatgtccctcccacaacacgtgggaattgtgggagctacaatccaagatgagatttcggtggggacacagccaaaccatatcaccgtgtaaaccagcattgtcctcccaagtaaacacctgtgatattctgtaccagaagcagaaccagaatttccagagttctttctattccataagtagattatttcatgacgactaaccctgtatctgataaaaataaataaataaataggccgggcgcggtggctcacgtctgtaatcccagcactttggaaggccgagtcgagcggatcacgaggtcagaagatcaagaccatcctggctaacacggtgaaaccctgtctgtactagaaatacaaaaaattagccgggtgtggtggtgggcccctgtagtcccagctactagggaggctgaggcaggagaatggcatgaacccgggaggcggagcttgcagtgagccgagattgtgccactgcactccagcctgggtgacagagcgagactccgtcccaaaataaataaataaataaataaataaataaataaataaataaatattttttaaaaaaacagactcctatttacatagaacaaaatgaaactgatgaaggaaatctgcttgtggttatttttaatattattgagaattgctttacaaatgttctttctttttatgcgcataggaagaagctcttttcctttcttcgtgacccactgccaactctcaatttaacatttatacttgaggaaattggaatgaaagcctctcagtagtatttttccatctgactcttccaaattctggaaaatatatcctgtgtcaaatctcaatataaattataaactgtccgggtgcagtggctcacacctgtaatcctaacactttggaaggcaggggtaggatgatgtcttgagcccaggagtttaagaccagcctgggtaatacagcgagaccccatctctacaaaaaataatttttaaaaaatattagccaggcgaggtggcacacacctgtagtcccagctcaggaggctgaggtgggaagagtgcctgagcccaggaaatagaagttacagtgagccatgattgcaccactgaactccagcctgggtaacagaccaagactgtctcaaaaaaaaaaaaaaattgtaagctaacaaatcatcagagactgaaatattataataattctaatcagaatgcagatgaatgcatttatgatgggtaaggcttagaaaaattataactgctccttagcaaagaacattggttgtgcttgaattttatggttataatgtatcaataaataactgaaccatatttatatatattatatctggaaagatccataatgattctgataaaaatatgaaaaacatcaactgactaagtagtcggtgcaactacttagaataatgggtagatattattacaaataacttcatcctttctgacaatgcagaataacttcatccatcctgacaatgtagcattttcatgagtttaatatgcattggctcccattgttgcaaggatatagacaaatcaaatgtactaccaaggctatactgacaatatcgtatgtgagaataaagccagttaatctagtcagaaaagcccaccattatggaacaaaggctgatgtgtagaacttcatttgtagaaccagatcctacaagccctcccaggaaattaaaccagtatatatgctgtggtttacaggatctcagtccagacttaaaggatcttgaaggaggaagaattcacccataaaagtaggcagcagggtgtggtggctcacgcctgtaatcccagcactttcgaaggcgatcacctgaagtcaggagtttgagactagcctggccgcatggtgaaaccccgtctctaccaaaaaatacaaaaattacctgggggtggtgacacatgcctgtgatcccagctcctcgagagcccaaggtgtgagactcgcttgaacccaggaggcggatgttgcagtgaaccaagattgcgccactacactccacctccaggtgacagagggagactccgtctcaaaaaaaaaagtaggcagtaaaagaaagttctattcgttccagactaatagagtccagtccaaatatacaactctagattccttacataatatccagacagaagctaattctctggttttagcagtgctcaccaccacataattctagatttactaaccatacaacaaggaggcctctgtgtgcaattaacacctcttgttttatctatgtaagtttaccaagccaaataggacagagcctacgctatataaaggtacaattcagagaccacatgaaatagccaccactgagtctgtgtactaatataaatgatatacaaacattattgatcattgggattgggaatatatgccacaaactaagctccaatttgttttctatttcccgtaacatttgtgagttatccgatattttaattaagaatagtacaaaccagaatcagaccaaccccttattttatcaatagctacctttagagataacatgatttcaggagctctgtgcaggaaacttattcaacacttggaaaataagacttaaaaatgattttcgtctggcgcagtggctcatatctgtaatcccagcactttgggagccgaagcaggtggatcacctgaggtcaggagtttgagaccagcctggccaacatttcaaaaccccgtctctactaaaaatacaaaaattagctgagcatggtggcgggcgcctgtaatcccagctactcgggaggcctgagacaggagaatggtgtgaacccgggaggcggagcttgcagtgagccgagattgtgccactgcagcctgggcgacagagcgagactctgtctcaaaaaaaaaaaaacacaaatggaaggaaggctggggctggggttgtggggcccaccccgtgtacactccacgtggcccagctgagagctcctcaggttgactcagagcacaggcagacaacaggtatcctaatttgcttccaacaccaaggccctggcgtatttcagaaaacctcggaaacaaaccctaaatgctcagcatttggaggcactaaaaacatgcacaaaacacacaagcattgagtgatttatttgccatgatctcttgctgctgttcagatccaagagacctcagggagaagggctgagcaggcaggggtgtccatccggccaccgcctctccctttcctcttgagggctctggggggtgttggactcacatgaataatcccagatctgaggacgctgacactgtcactgatgggacagaaagcagtcacgagaccaagtctgggctctcctggggcttccggtctactaggataagtggaaactaaataaacaactagaaatgcaatcatttcatggagcaaaaacacatgctaccaggaaagtccaactaggtgatgtggtggaaagtgactgcaggaggactctgctttaggtagcagggctggggaagttggtgacacctggcaggaaggaatacaaaggaatacaaaggaggtagccatggtgggcaaggggagtgacaagaggagaggcccaggcatggagaagagaagagaaagtgaaagtgcagagatttttgtttgtttgttttttgttttttgagacggagtcttgctctgtctcccaggctggagtacagtggtgcaatctcagctcactgcaacctctgcctcccaggttcaagcaattctccagccttagcctcccaagtagctgggattacgggtgcacgccaccatgactaattttcgtattttttgtagagacggggtttcaccatgttggccaggctggtctccaactcctgacctcaggtgatccacctgtctcggcctcccaaagtgctgggattacaggtgtgagccaccacacccggccagtacagagctctttagtgaagaaattggaggacttgaggatctgagagaggccagaggacagcccccagtgagcaagactcagtgagttctcaacttgaggcaggaagagatcaagatatagaggctcctattttatttcatgcataagacagagccttggagagtcttcaacaggggtgacaagacctggattgtgctttttttttttttttttttgtagagtctcactctgtcacccaggctggagtttagtggtgcaatctcggctcactgcaacctctgcttcccgggttcaagcaattctcctgcctaagcctcccaagtagctggaattacaggtgtgcaccaccacacccagctaatttttttgtattttttgtagagacagggtctcactgtgttgcccaggctggtctcaaactcgtgaactgaagcgatccacctgcctctgcctcccaaagtgctgggattacaggcatgagccatcatgcccagctggattgtgccttataaaagtccctttggctgaatgtagagagaaaatttgaggaaagcaggggtggaaatgagtggccagattagaaggctgtttgctcaagcaggagagagagcatcgtggcttgggtgagggtagggggagagggaggtagattcagatttgggattgattttggaggcatgactaacctgtgttctcacgaaaatggatttgtccccagagcaactacaagtctatgtgacatcaaggttcataagacaggagaatcaccaagggaaaaatagggccccaaccaataagacaaaaggaatagatgtaaggagaattggaacagggccctaagatctagaagtgctggtgttggaggtcaacagagtgtcattcactttgtcagccagcatttccacccctctggtttggtgtcagtgtttatctgctggctttctgcttcattcttagtcatcagcaccctcctttgtaccaccaggctagaagcctgcaaactatattgcccagcttcccttgtgagatggcttcccaataggttctgcttgcaggaagcaccacttctcaattctttctgcttctaggagggcctctggccacagccaaagaggtgaacaaggtcccagttcccactggtcatgaatttgtaatgtgtcaatttcattaagctgaaggaggtttcccacaagcctttccctatgcagctgaaagttagcatgggccccaggagacaacgtgcatgaatgtggaaggcagaagggaagcagaagccacatgcttttgtgttgggcaggtgggtgcaggcccaggcactgtggctgtcatgcacgttgtttgcaccttgaggctctccctggggatgtgaggcagcagccaggcccctacctctcccagctcccacaggatcctcctgcaggtacacatttaactccaaatcaaagagcagtgacttctcctggaagacatccgctcatgaaaattggagtcctggagactgtgagggtcccgtctgtctacatggcttcccactgatcctctcagttcgtcttccctggcttccccactttgtatcccatcttcccttcccaatacctgccctgctgacttcaggctgtaccagcagatgcagagagatcacccttacatagatggctcaaccagcttatgcaatgcatatggtcaaatccctatcacccatcccttatgaattgtgatattcagcttcctatatccatttacctagatgatatggtttggctgtgtccccacccaaatcttgtctccgaattgtagctcccataattcccatgtgttgtggagggacctggtgggagataattgaatcatgaggatggttcccccgtactgttctgtagtagtgaatacgtctcatgagagctgatgattttataagggtttcccctttcacttgattctcattctctcttgcctgccaccaggtaagacgtgacttttcccttctgccatgattgtgaggcctccccagccatgtggaactgtaagtccattaaacatcttttcctttataaattacccagtcttgggtatgtctttatcagtaatttgatcaaacactagtatccagttatttgatcaaacactaacctaggtgttgctatgaaagtattttgtacatgtgactgacatctactatcagttgactttaagtaaattatcctagataatctgggtgagcctgatccaatcagttgaaaggcctttgggggagcagaactgaggtttccctgaggaagaaggaattttgcttttgaatgacatcaactcctgcctgagagtttccagcctgccctgtggatcttggacttacctagccagcccctaaaatggcagaagcccattcatttgcaataagtaaatacataaatacataaatacatgtacacatatatgcatacatatatacatgtatgtatatatatgtgtatgtgcatatatcttagtctgttttgctttgctatcaaaaaaatacctgggctgggcgcggtggctcacgcctgtaatcccagcactttgggaggctgaggtgggtggatcacaaggtcaagagatcgagaccatcctggtgaacatggtgaaaccctgtgtctactaaaaatacaaaaaacaaattagctgggcatggtggcgtgtgcctgtagtcccagctactcaggaggctgaggcaggagaatggcttgaacctgggaggcggaggttgcagtgagccgagattgcgccactgcactccagcctggcgacacggcgagactccatctcaaaaaaaaaaaaaaagaaccaatctgagcctgggtactgggtaattcataaagaaaagaggtttatttgactcaccagtctgcagtgtgagggccacaggcttcttccactcatggcagaagtggaagggtagctggcatgtccaaatcacatggcaagagaatgagcaagagaatgggaagatgccagtctctttttaataaccagctcccaggggaactcttgcaggtgctaatagagagataactcactcactaccaagaggctgacaccaaaccaattgtgagaaattcacctccatgacccagacacctcccattaggtcccacccctgacattggggatcaaaatgcaacatgaggtttggagagtcaaatatccaaactccagcagcatatatgtgtatttatatgcatacgtgtatatatcatatctatatctcctactggttctgttcttctggagaaccaggactgatacctggatacgtatatgcatatccacatcttactcctcatcattctctttctctggctgacacctggctggtactttgctctcccagagcaaacccagagaagatattttattttgctggtatttcactttcctacttgctcttgagcatctgtcttttaaaagcttatatgagaactaacaactcttgttcatgcattcctgcatttattccacaaatctttttttttttttttttgagattgggtctcactgtgtcacccaggctggagtgcagtggtgcaatcttggctcactgcaacctctgcctcccaggctcaagtgatcctcctgcctctgcttcctaagtagctgggactataggcacatgacatcaggcccgctaatttttgcattttttgtagaggtggagtttcaccacgttgtccaggctggtctcaaactcctgggctcaggtgatctgcctgccttgacctcccaaagtgctgggattataggcatgagccattctgcctggcctactccacgaacttttgaacgccatgcacaaacatactctgtgctgtgctgtctgatgacacacaggttacaatactgataatggtccctaccctcacagacatcactgtccagtgatgggggaaagagagggagtggggagaagaatatttattagttatgtattagttatctactgccatataacaagtgtattagttatctactgccacataagaaattacaccaggccaggcattgcggcacatgcctgtaatcttggcactttgggaggccgaggcaggaggatcacttgagcccaggatgccgaggctgcagtgagccatgatcgtaccactgcacgccagcccaggcaacagagtaagacactgactcaaaaagacaaaaacaaaggcaaaacaaaaattacaccaacatgtattggcttaaaacaagaaacatttacgatgtcacaatttccagcagtcaggaatctgggtgagggtaactgggtggctttggctgtaggttcctcaaggctagagtcaaggggctggctggagctgcaggcatctcagggtggaaaatctgcctccagactcactcatggcagtgggcagccctcaggtccttgctggctgttggctggaggcatcagttccttgccccatgagcctctccccaggcagttcccataatggaagccccttccatagagcaagcaaggcaaggtggggaggaccagcaggacataaaccagtcttccagtaacctgtaccgggagtgacatcacatcacttctgccatatgctgtttgttagaagcttgtcactatgcccaatctacacacaaaggggtataggtcccagaagggcatgaataccacgaggctggaccactgcaggtcatcctaccataagtaaacatgttaagatgttaagataataaatatgaccatggctccacctggtgggaaacaatggcaaacagagtgacgaggtagaaagttctagttttaacagtttttttttttttttaaagaccaagtctcgctctgtcacccaggctggagtgcagtggtgtgatcttgatcttggctcactgcaacctccacctcccaggttcaagtgattctcctgcctcagcctcccgagtagctgggatcacaggcctgcaccaccacacccagctagttttgtatttttagtagagacagggtttcgccatgttggccaggctggtctccaactcctggcctcaagtgatccgcccacctcggcctcccagtgtgctgggattacaggcgtgagccaccactcctggccttagtttgaacagtttctgacttcatagttgtgttgccagataaagcaaggtcactcacatttatcatgaccaagtgagatttatcccagggatgcaaggatggttcaacatatgcaaatcagtcaatgtgatacatcatatcaatacaatgagggaaaaaaaccatatgatcatttcaattgatgctgacaaagcctttaatagaattcaacatcccttcatgataaaaaccctcaaaaaattgggtatagaaggaacatacctcaacataataaaagtcatgtatgacagacatacagctagaatcatactgaatggagaaaaactgaaagcctttcctctaagatctggagcaagacaaggatgcccacttcccccactgttcttcaacgtagtagtggaagtcctagctacagcaatcagaaaagagaaagaaataaagggcatccaggttggaaaggaagaagtcaaattatccttattcgcagataatatgatcttatatttggaaaagcctaagggcaaaagatcagaatagacatttttcagaagacacacaaatggcaaacaggtatatgaaaaggtactcaacatcaacatcattgaccatcagaaaaatgtgaatcaaaactacaacgagatatcacctcaccccagtcacaatggcttttatccaaaatatgtaataacaaatgctggcgaggatgtggagaaacgggaaccctcatacactgttggtgggaatgtaaattagtacagacactctggagaacagtatggaggttcttcaaaaaactacaaagagaactaccatatgatctagcaatcccatgctgtgtatatacccaaaaggaaggaagtcagtgtatccaagagatacctgcacccccatgtttgttgcagcacagttcaccacagccaagatttggaagcaagctgagtgtccaccaacagacatatggataaagaaaatgtggtacctatgcacaatgggtactgttttgttgtcgttgttgttattgttgttattgtttttgagacagagtctcaccctgttgcccaggctggagtgcaatggcacgacctcggctcactgcaacctccgcctcctgggttcaagtgattctcctgcctcagcctctggagtagctgagattacaggcgcacaccaccacgcccagctgattttttcttgtatctttggcagagatggggtttcaccatgttggggcaggctggtctcaaactcctgacctcaggtgatcctcccacctcagcctcccaaagtgctgggattacaggtgtgaaccaccatgcctggccacaatgggatacttttcaaccataacaaagattgagatcctgtcatttgcaacaacatggagggaaccagagatcattatgttgagtaaaatcagccaggcatggaaaaataaatgtcccatcttctcactcatttgtgggagctaaacattaaaacaattgagttcatggagacggagagtagaagaatggttaccagggactgggaagggtagtggagcagggggaagtggggatggttcgtagttataacaatgcagttaaatagaatgaataagttctagtatttgatagcacaacagggtgactacagtcaacaatacattttagggccgggcgcagtggctcacacctgtaatcacagcactttgggaggccgaggcggtggatcacctgaggtcaggagttcgagaccatcctggccaacatggtgaaaccctctctctactgaaaatacaaaaactagccaggtgtggtggcacacacctgtaatcccacctactcaggaggctgaagcaggaggatcgcttgaacccaggaggcagaggttgcagtgagccgagattgcaccactgcactccagcctgggtgacagagcaagactctgtctaaaaaaaaaaaagaaaaaaacaaacccatactttactgtacattttaaataactaaaagagtatatttggggtgtatgtaatacaaagaaattgtacatgcttgaggggataccccatttaccctaatgtgataattacacattgcatgcctgtatcaaaatatctcacgtatcccataaatgtatacacttactctgtacccgtaaaaacattttgggctgggcatggtggcgcacgcctgtaatcctagcactttgggaggccaaggcgggtggatcatgaggtcaggagatcgagaccatcctggctaacacggtgaaaccccatctctactaaaaatacaaaaaattagccgggcttggtggcgggtgcctgtggtcccagctacttgggaggctgaggaggagaatggcatgaacccggggggcggagcttgcagtgagctgagatggcgccactgcactccagcctgggcaacggagcgagactccatctcagaaaaaaaaaattttttttcaaaaagaattttttataaaaacatgtcacccagttaaatttgaatttcagataaacaacaaatacttttttagtatgagtatatcccatgcaacattttggatatatttatttaaaaacacctcattgtttatctgaactttaaatttaacttggctttctatctttttagttgctcagtgtggccaccttcctccagggcagcacagggctcaggagtggaggagccaggctagggactatggtaccaaaaccagccagcaggttagaggtgaggacgcaatgatgacaaactcctggagagggagacatggaggcaggatcagcaaaatgtcggggaagaggactgagcttttttttttttctttcttttgagacagagtctccctctgtcgcccaggctggaatgcagtggcacgatctcggctcactgtaacctccacctcccaggttcaagtgattcttctgcctcagactcccgagtacctgggactacgggtaagcgccaccacacctggctaatttttgtatttttagtagaggcagggtttcaccatattggccaggctggtctcgaactcctgacctcatgatctgtccacctcggcctcccaaagtgctgggattaaaggtgtgagccaccgtgtccggccctgagcttctttttaaacccataataaaccacatatttaatgtctttacattattgctgcctgagtcccccccatgagaaggaaaactccacaaaaaaacagggactgctgtctgatttgttcattgctgtgttcccagtacctagaagatgacttggcacctagcaggcgctcaagaaatgttgtctgaaggccaggcgtggtggcttatgcctgtcatcctaccactttagaaggccaaggtgggcggatcacctgaggttgggagctcaagaccagcctggccaacatggcaaaaccccgtctctactaaaaatacaaaaatcagctgagcatggtggcgggcatctgtaatctcaactaatcagaaggctgaggcaggagaattacttgaacgctgaaggtggaggtggcagtgagccgagatcctgccactgcactccagcctgcgagacagagcaagactccatcagaaagaaagaaagaaagaaagaaagaaagaaagaaagaaagaaagaaagaaagaaagaaagaaagagagagagagagagagagagaggaaggaaggaaggaagaaagagaaagaaagaaagagagaaggaaagaaagaaggaaagaaggaaggaaagaaggagaaagaaagaaaggaggaaagaaggaaggaaggaaagaaggaaggaagcaaggaaggaaggaagaaatgttggctgaagaaatgaatctttgagttgcttaaagaatctcagctctctggctcaggagtcaaggatgagaggaggacaggaggagatgagtctgctgggagagacagaggagtcatccctgggatggggatgtgagaggaacaggactggtgggggaagatgctgagatcaacttggacacggtgagtggaaagtacccagcagacatctggagagagacattcaggaatcccttgtctagccaagcctggagctcagagagagaactggcgtggtagacagaaaaatgccccctccaaggatatccacgttctaatccctagacttgtgaacagctttgctacttggcaaaatggactgtgcaggtgtaattaagctaaggctgttgatatggggtgattatcctagcgtacctgggtgggccattataaacacaatcctcacaaacacaatgctctttataagcgttatgggttgagtggtgtttcccaaaaagatatgctgaagccctctttcccagtccctcagaatgtgacctcatttggaaacagggttgttgcagatatgattaattaaatgaacataaagtcatggccaggtgcagtggctcaggcctgtaaacccagcacttcaggagatcgatggtagaggatagcctgagtgcaggagttctagaccagcctgagcaacatagcaagaccccctctctaccaaaaaaaaaaaaaatttttttttttttgacagagtttcactcttgttgtccaggctagagtgcaatggcacgatctctgctcacttcaacctccacctcctgggttcaagtgattctccagcctcagtctcccaagtagctgggattacaggcgcccgccaccactcccatctaatttttgtatttttaatacagacaaggtttcatcatgttggccaggctggtcttgaacttctgacctcagtgagctgcccgccttggcctcctgggattacaggcataagccacggtgtctggcctctacaaaaaaaaattttttttaattagctgagcgtggtggcacacacctgcagtcctagctacttgggaggctaaagcagaaggattatttaaaaccaggagtttgaggctgcagtgagctatgattgcaccactgcactccaggctggatggcagagcgaaaccctgtctcaaaaacaaacaaacaaaaaaaattcaaggtgttggcaaggccatactccctctgaaacctatgcccttatctctccattcaggtttcccatttatacctttggaatttgtagttattgatttccacacaattgcaaccaaggctgaatggggccccgggctccagccacagggctgggcatgacagccacactggaagtcatcagcacagagacaatgctgggaacatccctgagaagtgggagctcctgactgcccacacaagcaacagatgtcagccttgggcttttgtccttcaagctcaagtcatctctctgaccgtttcttgccagcctccccaggcacctcctcttccctcccctgagcatgatccgtggctgccctgtgcccaggccctcttgccatcttcacctgttctccccgatctcattcattctcaccacttctgtctctcattcctttccctccctgtgcatctctgtcctcagccccagtgtgttcaggtcttcttgctgctgtaatgaatgactacaggctaagtggcttaaacaatacaaatttgctctcttgcagttctgaggggtagaagtctagcacgggtcgcactgggttaaaatcaaagatgtgctccttctggaggctctagggcaggaatccccaacccccacgccacacactgtgatgtggtttggctctgtgtctccacccaaatctcatgtcaaattgtaatctccacatgcctgggggagggacctggtgggaggtaattggatcatgggcgcggtttcccccacgctgttctcatgatagtgaatgagttatcatgagatctgatggtttaaaagtgtgtgacaggccgggctcaggggctcacgtccataatcccagcactttgggaggccgaggcaggcagatcacccgaggacaggagttcaacaccagcctggccaacgtggtgaacccctgtctctactaaaatacaaaaattagccaggcatggtagctggcgcctgtaatcccagctattcagaaggctgaggcaggagaattgcttgaacacaggaggtaaggttgcaatgagctgagatcgtgccactgcactccagcctgggtgacagagccagactcctcaaaaaaaaaaaaaagtacatatatatatatatatatatatatatatatatatatatatatgatattatatatgagatacatattttatatatatgatatatatgatattgggaggccaggcacagtggctcatgcctgtaatcccagcactttgggagactgaggcaggtgaatcacctgaggtcagaagttcgagatcagcctggccaacatggcgaaatcctgtctctactaaaaattcaaaaacgtagttaggtgtggtggtgtgtgcctgtaacccccactacttggaaggctgagggtacaagaattgcttgaacccaggaagcggaggttggagtgagccaagatcacaccactgcactccaccctggcaacaaaatgagaccctttttctttgaaaataacttagaaattagctatgcaaagtggtgcaggcctgtagtcccagctacttgggaggctgaacaagaggatggcttgagcccagaaattcgaggctgcggtgacctgggatcacactacagcctgggtgagggtgagaccccatccctttaaaaaaaaaaaagaaagaaagaaagaaattaaaaacagccaggtgcagtggctcacacctgtaatttcaacaggttggaaagcagaggcagaaccacatgatgggaccttgtctctacaaaaaattaaaaaaaaaaaaaaaaagattgggtggcttaaacaacagacatttattttttcacagttctggaggctggggagtccaagatgaaggtgccagcagattcagttgttggtgaggccttgcttcctgacttgcaagcagacgcctttttgctgtgccttcccatggcctttccccagtgtgtgcacgtggagaacgtgagctctggtttctcttcctcttgttttttttctttctttctttttgagatggagtcttgctccatagcccaggctgaagtgcagtggcgtgatctcggctcactgcaacctctgcctccagggttcaagcgattctcctgcctcagcctcccaagtagctgggattacaggcacccgccaccatgcctggttaatttttttgtatttagtagagatgggctttcaccaggctggccaggctggccaggctggtctcaaactcctgggctcaagtgatccacctgcctcagcctcccaaatgttgggattacagggtgagccaccactcccagcctctcttcctcttcctataagggtactaatcctatcatgggggtcccagcctcctgacctgatctaaatctaattacctccaaagttccctgcctccaaataatatcacactgatggttttggcttcaagatatgaattcagagaggacacaaacattcagtctacaacactcaagcaagcagaaaatggtaagaataatatgatttctctttttcagtccattgtctgtgtgcgagatattcatgatcatacacattatgttcatatacatgatctcacttaccatgatcctgacgtagtaagttatctatcgctgtgtaacaaatcagcccaagatttactggttgatgtggtttggctctgtgttcccaccgaaatctcatctcaaattgtaatccccacctgttaagggaaggaggtaattggatcatggggatggtttccccatgctgttctcatgacagtgagatctaatgttttttgttttgtttttttttgagacggagtctcgctctgtcacccaggctggagtgcagtggtgcgatctcggctcactgcaacctgcgcctcccgagttcgtgccattctcctgcctcagcctcccgagtaactgggactacaagcgtccgccaccacacccggctaattttttttgtacttttagtagagacggggtttcaccgtgttaaccaggatggtctcgatctcctgacctcgtgatccgtccaccttggcctcccaaagagctgggattacaggcttgagccaccgcacccggccagatctaatggtttaataagtgtttgacagttcctccttcacatgacctctcatttcctgccatacaagacatccctacttccccttccggcattattgtctgtttcctgaggcctccttagccatgcagaactgtgaatcaattaaacctcttttctttataaattacccagtcttaggcagttatttatagcagtgtgaaaacagacaaatacactggtataaaacaacaatgggccaggcgtggtggctcatgcttgtaatcccagcactttgggaggctgaggcaggcagatcacttgaggtcaggagttggagaccagcctggccaacatgatgaaaccccgtctctactaaaaatacaaaaattagccaggcttggtggcgcacccctggaatcccagctacttgggaggctgaggtgggagaatcgcttaaaccagagaggcagagattgccgtgagccaagatcatgccactgcactccagcctgggtgacaggctgagactctatctcaaaaatcatcatcatcatcattatcatcatcatttgttatctcttgcagtgcctaggagtcaggaattcaggagcagcccagctagggagtggcagctctaggtctctaataagtttgcagtcagatagtggctgggtgtgggatcattttaaagctttcctaaattacatatctggtaccaaaggctccttggctcccttctctctccatagggtctctccaccatggtgactcagagctcccaaggcacaaatcccaagacagagagacccagggagtggctgtgtcaccttttctaatctagcctcggaaatcacttatcatctgttcatgagaagcaagtcaatagggctgcccgtattctagaggacaagaactggaatccacctttttattttttcaatttttaaatattttttttaggcagggcgtggtggcttacgcctgtaatcccagcactttgggagtccgaggcgggcggatcacgaggtcaggagatcgagaccatcctggctgacacggtgaaaccccgtctctactaaaaatacaaaaaattagccgggcgtggtggcgggcgcctatagtcccagctactcgggaagctgaggcaggagaatggcgagaacccgggaggcggagcttgcagtgagccgagataacgccactgcactccagcctgggcgacagagtgagactctatctcaaaaaaaaaaaaaaaaaaaaaaaaaaaaatatatatatatatatatatatgtatttttaaaatatatatttatttaatatatatttaatattttatatatatatatatttttttaatagagacagggtcttgctctgttgcccaggctggtctcctgggctcaaacaatgctcccacctcagcctcccaaagtgctgggattacaggtgtgaaccaccatgcctggccagaatccatctttgtataagaggaatttaaataaattgtagacacttattaaaactaccacagtaggtacttttttatgcccattttacagacaagaaaaccgaggcacagggaagctaagtaacttgcctaatgtcacataacttgggcttcacgcatggtggctcacacctgtaacccaatattttgagagtcagaggcagagggattgcctccaagaggcagaggcagcaggattgtaccaccaagaccagctaaggaggcaggaggattacttgagcctagaagttcgagacccgcctcagcaacatagtgagaccttgtctctacaaaaaaatgcttttaaaaattagccaggcatggtggtgcaggcctttgatcccagctactcggtaggttgaggcaggagaatcgcttgagaccaggaggtcaaggctgcagtgagccatgtacatgccactgcacttcggcctaggcgacagaggaaaaccctatcttaaaaacataagtaaattcatttaaaaattaaataaaatgcaagtctccaaccattaacaaagggagtgtcaaaaagtcatggaaaaaagggttttttaaaaaacaatttaaggaacataaagataacgtttaaaatgtaaaatagaagtgaatatattttttccctgcaactacactgaaagagatactgttttgcataataaaactgtctaaagaatctgtcctgataacgtaattgaaaatattcccaagaacgcctgtcttgttttgctgtgcggtcaggagccctgagttcctgtcaccacctggtctgttcatttaagacggtccttggaaagataattggaacaaaagaggcttgtgagattctcctagaaattgttgccaatcttgagaaaaataatctcccagagaagcctgcaattctgattggttttcttcctgatcatctgttgccatggtgacagccatcatctctctattattaaaaggaagaaatgactgtaggttttctctctctaaaccagaagacgatcgttggcacttttctcccacaaacataatggaaataaaagcctgtgactctgctagattttttcaaaaaaacaaagacattgagagtcctgtctcatttaaatgaatcaaagcactcatccccacgcacagatagacataaatggtggtagctgtgggcatcgcggttgtggtcggctgtcatcttcacttcatcagagcgcccactggtgggtaatgagagaacagcagggctatcccagctaggagacccccttccctcccttcctctctggagggttcaccaccccaaatagccaggcttgcagtggagggcagaactagggacagaaatccctggatattctaccaaggatgggaggatggcccctcctgctctcagcccccgtcatggtctcctattgtgtaccagacattgttctatcccctctacattctccatgctcactacaaccccttaagtggggaattatgactgccctacctacagatgaggattccaaaaccagagaggtttagtctcctgcccaaggtcacacataaactggaggacctatgagttattcaaacccaggtctctctgacagtaggcagagaacttcagcgtagagggaatgtggcgggactcaaaaggctcccaatccaccctcaagagagacttttcaggactgattgggtttatcagcaagaggcatccaacatccagctatctaataatcagggtgattcatggctaacagttattgagctctcatcaagtgctatgttctgggctaagtactttggatgtataatcccactaaatcctcctgacaaattttgggagaaaaattacgattgtgcccatttcacagaagagaagactgaggttcagagaggcccattatattgccccaggtcacacagctgggaagtattggagccaggtttgtaaactcgtgtttgcctggctccaaagcttctactcttctccagtagactatttagaaagaccagctttggatatgggtgtgggcctgactcaatgcagtaagtgctttctgggcccaagtaaaggccctgccattttccgatttgctgtttcgttttttgtattagttatttatggctgtataacaaatcaccccaagatccagcaatcccacaactcaatatacatacagaggaaatgaaatcagtatgtcaaagagatctccgtattcccttgttcattacagcactactcacaatagccaagatatggaatgaacctaagttgccatcaacagatgaatggataaagaaaatgtggtacatagacacaatggagtactattctgccttaaaaagaaggaaattttgttcctggcaacaacatagacaaatctggaggatactgtaagtgaaataacccagaaataagccagccaaataagccaaagaaaaacaaataccacatgatctcactcgcatggagattgtaaaaaagttaaagtaaatagggagtagaaaggtaatggttataggtggtggagggttgaggagatgttggtctaagggcacagatttttaattagataggaggaataagttcaagagatctattgtataatatggccactatggttaattacaactataattattctataattatctaattatactataatattcaagaatgtattttactcttgaaaattgctaagagaataaaaaatcacccccaaacctggcaacttaaaagaacaacaattatttattttactcacaaatctgcagtttagaggtttgtcagggacagttctctgctctgcaaggtgttagctgaatagcatcagaatctgctttgaagaagacaactactttcctagctattttctgggaagtgtgagcttgggacctcattcctattcatatgatcctttcctctggctccttgaacttcctcacaacatggtggctggattccaagagcaagcattctaagagaacaaggcatgtctttttttttttttttttttttgagacagggtctccctttgttgcccagactagtcttgaactcctgggctcacacaatccgcccacctcagcctcccaaagtgctggaattacagacatgagccaccatgcctggcctatgcatagcatttgtatgatccagctttggaagtcatatcatcgcttccactttattagtcaaggcagtagggactgctcaagctcaagggaagagacatagaccccatctcttgattctagaagcatgtggaataggagatattattgtcgctatctgtagaaagtaaaatctgacatactctcaaaggcagtgtagggtagactggaatatcccacttggtccctcgttgcccactctctgggaaaagggggatgttttactgcagaggatgggagggtgaagacccagcaaggtcttggccttggagctctaagaatccaagaatctaataatagttttagggacaagagggtcacttggagagaaggtgtctctttgggggatatttaaggatccatgggctggacctgccttttattaaataactactaaagatctctagataactcatggctagctctggaagaagatcctagacatagcacgaaggtcaagatcctagacattggggccaggtaggccaccgtcccagttccagctatctatgtattccttggtcactatctatgtattccttgtctgctgcagcctcagtttcctcatttgtaaaattggtataaaaataatatatagtacaggaccgggcacggtggctcacgcctgtaatcccagcacttagggaggccgaggcaggcagatcttgaggtcaggagatcaagaccatcctggcgaacactgtgaaaacccatctctactaaaaatacaaaaaaaattagccgggcgcggtggcaggcacctgtagtcccagctactcaggaggctgaggcaaaagaatggcatgaacccgggaggcagagcttgcagtgagcagagatggcgccacggcactccagcctgggcaacagagcgagactccatctcaaaaaataataataataataagtagtagtagtagaggttaggtgaagcctgagacctggtggtgtatgagccagagcagaatccagagtaaaacccagtattgttgttgcctcaggccctctgtggccagcatctatctccatctgtgccatcagtgcctgcccctataggggcactagctgttccaaccgggtcaccctggctgaattgaagataacttataaaaagccacatcttggctgggcgcggtggctcacgcctgtaatcccaacactttgggaagctgaggcaggtggattacctgaggtcaggagttcaagatgagcctgggcaacatggtgaaaccccgcctctactaaaaatacaaaaattagctgggcatggtggcacacacctgtaatccccacgtacttgggaggctgaggcaggagaattgcttgaactcaggaggtggaagttgcagccagccaagatcgcgccactgcactccagcctgggcgacagggtaagactccatgtaaaaaaaaaaacaaagagccacaactttaaagttgtggaaattggatgccattaacattgtcaacaaaagtttttgaaataccagccgggcgcagtggctcacacctgtaatcccagcattttgagaggctgaggaaggtggatcacctgaggtcaggagtttgacaccagcctggccaacatggcaaaactccatccctgcaaaaaatacaaaaattagcagggcatggtggcatgcacctgtagtcccagctactcaggaggctgaggcaggagaatcgcttgaacccaggaggcagaggttgcagtgagctgacaccattgtactccagtccgggcgacagagcaagactctgtcaaaaaaataaaattgaaatatctaagaataaggccaggtgcagtagctcatgcctataatcccagcactatgggaggccaagataggaggattgcttgaggccaggagttcgaggctgcagtgagctgcgattgcaccattgcactccagcctggataacagaacaagatcctgtctctaaaaaataaaaagaaaagtttaaaaaaaagttttttaagtgaaagacaaatcagatcaatgaaaatgaacacatgatatacaaaaacatatgggatacactaaagtagtgcttggaggaaaatttacagctgcaaattgcctatattgaaagagaaaaatggtctcaaatcaataacctaatcttccatcttaagaaactagaaaaagaagtgcaaactaaacccaaagcaagcagaaggcaggaaataataaagattagaaaggaagtaaatgaaacagagaaaagaaaaacaagagaaaatcgaccaaaccaagtttggttctttgaaaagatctacaaaattgacaaatctttaactagactaaccaagggaaaaaagaaaagtctaaaattattaaagtcaagaatgaaggaggagacatcactactgaccttacacaaatacaaaggcttataagggaataccatgaataagtgcgtgccaacatattagatagtctaggtaaaatggtcaaattcctagaaagacacaaactatcaaaactgactgaaaaatatagaaaatctgagtacacctataacaagagattgaaatggtaattttaaaagttttcacaaagaaaagtccacaatcagatggtttcactggtgaattctaccaaatattcaaagaagaatcaacacaaatccctcacgaatgtttttgaaacatagaacaagagagaacacttcctacctcattccatgaggtcaatattaccctgataccaaaatcaaacacatcgtaaaaaaagaaaaccaaaaagagaccaatatcctttataaatatagataaaaacattctccaccaggcgcagagaatcaaacctgtaatcccagcactttgggaggccaaggtggacggatcacctgaggtcaggagttcaagaccagcctggccaacatggcaaaaccccgtctctactaaaaatacaaaaattagccaggcgtggtggcgtatgcctgtagtcccacgtacttgggacgctgaggcaagagaattgcttgaacccaggggttggaggttgcaatgagccaagatcatgccactgcactccagcctgggcaacagagagataatccatctcaaaaaaaaaaaaaattctcaacaaaatactacgaaactgattccagaaacatataaaaaggattatatgccatgaccaagtgagatttattttaggaatgcaagacatgaaaattcatcagtgtaataaaccatattaacaaactaaagaacaagaagtacatgatcatctctgcaggtgaaaaaaaagcattttacaaaaaatccaacattctttcatgataaaaaattaaaactcaataaactaggaatagaatgaaatttcctcaacctaataaagggcatttatgaaaaacctacagctgacattatacttaattatgaaagactgaaacctttcccctaagatcaggcacatgatcagatgtctactcttattgtgtctatttaacattgtactgggagttctagccaggacagtcaggcaaggaaaaaaaaaaaaaaaaagcatccaggcagacgtggtggctcatgcctgtaatcccaacacaatgggaggccgaaacagccggatcacttgaggtcatgagtttgagaccagcctggccaagatggcaaaaccctgtctgtactaaaaatacaaaaattagctgggcgtgatggtgcatgcttgtagtcccagctacttgggaggctgaggcaggagaattgcttgaactgggagatggaggttgcagtgagctgagatcatgccactgcatgcactccagcctgggcgacagagcaagactctgtctcaaaaaaaaaaaaaaaaaaattcagactataaaggaagaaggaaaactctatttgcaggtgacataatcttacacataggaaagtcttaaggaatctacacacacacacacacaactactagagctaattaacaattttagcaatttttcagaatacaagatcaatatctaaaaatcagttgtatttctgtatacatcagcaattaacagtctgaaaataaaattaagaaaacaattccattcgtaatagcatcaaaaagaataaaaggcttaggtatgaacttaagaagactttgtaagaattttacactataatgcacaaaaccaacatcaaaataaatgttaacagacatagataagtggagagacactctgtgtttatgaattggaagatttaatattgtttagatggcaatattccccaaatagaactgcagattcaacacaatccacatcaaaattacagctgccttttttgtagaaattgacaagctgattttaaaatttatatgaaaatgcaaggaatccagaatagccaaaataatcttgaaaaggaacaaagtcagaggacctacacttcccaattttaaaacttactactaagctgagtaatcaagatttttggtacttacataaacacagaggaatgagagtctattttaaaaactcatatgtctatagtcaactgattttcaacaagggtgccaaaaaaatcaatgaagaaattcaatgccttttcaacaaatggtgctggcacaattatatatccacaggtaaaaacaggaagttggacccctgcctcacaccacatatacaacttaacttgaaatggatcagaggcctaaatgttaagagttaaacctggaaaactctcagaaaacatagatgtatagtcgtgcgttgcttaacaatggggatacattctgagatatgtatcgttaggtgatttcatcattgtgcaaacatcatggagtgtacttatccaaacctaaatggtagagcctactgaatacgtgggctagaggataaaacctattgctactaggctacaaacctgtacagcatgttactttactgaatattgtaagcaatggaaacacaatgggtatttgcatacctaaacatagaaaaggtatagtaaaaatacagtattataatcttatagaccaccatcatgtatgtggtccatcactgaccaaaatgtcattatatggtgcacgactgtatatctttgtaaccttagatatgacatcatggcttcttagatattacatcacaagtacatgcaataaaaaaatacatacaaattagacctcatcaaattttaaattttgtgcttcaaaagacactattaatgaagtgaaaagaaaacctacaggatgggagatttgcaaatcatctgatacaatctgataagtagtgtctagactccagaatatataaagagcacttacaattcaacagcaagaagacaaataactcaattttaaaatgggcaaaagatctaagtagacatttctccaaagaagatatataaatggccaaggagcacataaatatatacctaacatcattagtcattaaagaaactaaatggatgagccaggcacggtggctcacacctgtaatcccagcactttgggaggccaaggcaggcagatcacctgaggtcgggagttcaagaccagtctgaccaacatggagaaaacctgtctctactaaaaatacaaaattagccaggcgtggtggcaggcacctgtagtcccaactactcaggaggctgaggcagtagaaacggttgaacccgggaggtggaggttgccatgagccaagatcgcgccatcgcactccagtctgggcaacaagagtaaagctccgtctcaaaaaaaagaaattaaatggatggattaaaatggtggccactacccaagtcaaatgaaatcttccccctccatggtccctggacaagggaatgttactcttacaaatcttctgttgacaatacattttgattgtttgggttttttgtttgttgacaaataattgcatatattcatgggaaacatagtgatatttcaataaagaaaatgtatgatgatcagagcagggtaatttcatgtcctttgtgaaaggaaaataaatctcctccagaaatcactaagccaaagggaaaagtcaagatgggacatccatcaggcaaacatgcctcctgttttattcctaaataagataactacaaaaatttaaaaagctacacagttccctcaaaatatgtcagaaaggaaatttcttgtgagcctcaagatctttatcctgaaacagttctgttgaatttcaccctggcaatgtaaattgataactgataccttatcttcacagatgggggacaaaggacagacagaacccaacgccatccctcttctcacctgagacaaatgcatatctgatggcttcctctgcccagttgtttatgtaaaaatgcagattcactaagcgagactcaggcataagtgactactcctctatggcgtctcacatataaattgtgtattcagtgaaagacttatcagagactcaaaagaatgcaactgttggtctcttatctatctgtgacctggaagcaccccaccccccaaccctggtaggtgcatcaagttgtcccatctttccagacagaaccaatatacatcttacatatattgagtggtgtccatgtctccttaaaatgtataaagtgaagctgtgccccaaccgccttgggcacatgtcatcaggacctcctgaggctgtgtcacaggagtgtccttaaccttggcaagataaactttctaaattgattgcaacctgtctcagatacttttggatcacacctctaacaagcctccccctatcccttcccaccctctagtatcctacatttttgagtggtagaagttccaagctaggaggaattggtcttaaagatagtctaacaacattctcaaattttaggatgtttccaagtcatctggagggcttgtcaaaacacatatttctggagcccaatcccagagtttctgatttagtaagtctggggtggggcccagaaattggattttctcaaaagtttacagttgatgctgatgcagctggtgtaaccctttccttctacacatatgaaagctggctccaacagagatggtgtgaatggtgcagctagttgtacaaagtgctgtccagtaagaaccttctgtgatgatgtacatgctcttctgtcctccccaacaccgtagccacatgtggttactgagcacttaaaacgtggctagtgcaactgagacttcatatttttaatgcaattaatcttaatgaattttaattcatatgatcgcatatcatacttactagagtaagtaccatgttggacaccacatttctacaagtgaggtctcctgactcccaagccagtaaactttctaatacacagtactgccttctgttttcaagccactaaggatgtatgcaagaggagaatctctaggtcttagtaaacctacatgctcaacttgccaatagacattgtcaaatggttgtctgtggctgagaccatggtatacactcaccaaattctgtttccagttccttcttcaaaggcacatgagaaaatatatttctccatccacttgcagtgagatgagaccacacgactggttctggacaaggaaatataagctgaagtgacatatgtcacttctagaccgaggcaatgaaaacctcctgagagattttcttttttttgttgttttttttcttttttgagacggagtcttgctctgtcgcccaggctggagtgcagtgacacaatatcggttcattgcaagctccgcctcccgggttcatgccattctccttcctcagcctcctgagtagctgggaccacaggcacccgccaccacgcccggttaatttttttttcttttttgtatttttagtagagatggggtttcaccatgttagtcaggatggtctcgatctactgacctcgtgatccgcccgcctcggcctcccaaagtgctgagattataggcgtgagccaccgcgcccagcctgagagattttctcatctctctctccccagctctggcagcatagaggcctttaggagagatgaaagatgctaggttacagggttaacacatggagctggcctgaagagtagctgggatttacagtggactttgtgtgaatgagagataaactttaattgtgctaactgagatttttgaagttatttgttactgcactgtgacctagtctatcctaaattatacactcgctggcatgattgtatcaatactcccatcagcattttatgagaatttccatctccccatacttatttatttattcgaaaaatagttattggccaggtgtggtggctcacacctgtaatcccagcactttgggaggccaaggcggctggatcacctgaggtcaggagttcgagaccaacctggccaacatgatgaaaacccatctctactaaaaatacaaaaaattagccaggcatggttgcggatgcctgtaatcccagttactcaggaggctgaggcaggagaatcccttgaacccgggaggcggaggttgcaatgggcagagagcatgccattgcactccagcctgggagatagagagagactccatctcaaacaaaaataaagttattgatagctgggcctggtggcatgcacctgtagtcccagctacttgggaggctgaagtgggaggattgcttgggcctgggaggcagaggttgcaatgagccaagattgcaccaactgcattccagcctgggcaacatagcaagacactgactcaaaaaaacatagttattgagcacctactatgttcctgggtctattttaggcactggagatacaacagcaaacaaaatagacagaaaattgtgacctcatggaacttatattccagtgaaagaatcaaacaataaatataatgaaaaagaagataatattatattttattttagcaggtgggcactgctatgaaaaacattaaagccaggtaaagggaattgagagcattgggttgcaatttttttttcttttttaaattttatttctttattgatacataacagatatacatattttcagggaacatgcggtaacttaataaatttatataatttgtaaagaccaaatcagggggccaggtgtggtggctcatgcctgtaatcccaacactttgggaagccgaggtgggtggatcacaaggtcagaagttcaagaccagcctggccaagatgatgaaaccctgtctctgctaaacatacaaaaattaggctggcatggtggtgggcacctgtaatcccagctactcgggaggctgaggtagaaaattgcttgaacacgggaggcggcagttgcagtgagctgagattgcaccactgtactccagcctgggcgacagagcaagactctgtctaaaaaaaaaaaaaaaaaaaaaaaaaagatcaaatcagggtaattaggatattcatcaccttaaatattcatctttatgctaaaaacatgaagtcttcttctattattctaattttgaaatgtacaacagattattgtaaactatactcaccctactgatctatcaaacaccagatcttatttcttccatcttacatttcttccaaatgtagctatacatttgtacccattagtcaatttctcttcatttcccccctccaccctacccttcctggctactggtaggaatcacctatctgctctctatcttcatgagatccactttttcagcacccacacatgaatgaaaacatacgatatttgtctttctgtgcttggcttatttcacttaacatgatgctgcaaatgtcagaatttcattcttttttatggctgaataatattccattgtgtacatatagcacattttttctttttttttttcttttgagacagcgtctctctctgtcacccaggctggagtgcagtagcgcaatctcagctccctgtaacctctgcctccagggttcaagcaattctcgtgcctcagcctccctagtagttggaattacaggcatgagccaccaccggttaatttttgtatttttagtagagatggggtttcaccatgttgtgcaggctggtcttgaactgacctcaagtgatccacctcccaaagtgctgagattacaggcgtgagccacctcactcaaccatataccacattttctttatgcattcgctctttgatgggcacttagattgactccattatcttggttattgcagcaaacagtgctgcaataaacatgtgaatgcaaagagcatttctccagtgttttcctctggtagtttcatagtttcagatcttagatttgagtctttaatagatttttgtttaattcttggatacagtgacttccttccttttgggtgtattcatagcatgggattgctggatcatatggtagttctatttataattttttgaggaacctccatactgttctccagagtggctgtactaatttacattcccaccaacagtgtatgagggttcccctttctctacgtctttgccagcatccacctttttataaaggccgttttaactggggtgaggtgatagctcactgtagctttgatttgcatttctctgacaattagcgatgttgagcatttttgtatataccccttagccatttgaatgtcttcttttaagaaacgtccattcagatcctttgctcactgtattagtcagggttctctagagggacagaactgataggatagatgtatatatgaaggggagtgtaataaggagtattgagtcacatgatcacaaggtgaataggccgtctgcaagctgaggagcaagaagccagtcccaaaacctcaaaagtagggaagccgactgagcatggtggctcaagcctgtgatcccagcactttgggaggccaaggaaggtgaatcacctgaggtcaggagttcaagaccagcctggccaacatggtgaaaccccatctctactaaaaacacagaaaatagtcgggcatggtggtgcacgcctgtaatcgcacctactcgggaggctgaggcaggagaattgcttgaacccgggaggcagaggttgcagtgagccgagatggtgccactgcattccagcctgggtgacagagtgagactccatctcaaaaagaaaaaaaaaagtagggaagctgacagtgcagacttcagtctgtagccaaaggccctggcaaatcactggtgaaagtccgcacgtccaaaagctgaagaacttggagactgatcaagggcaggaagcatccagcacggaagaaagatgaaggccggaagtctcagcgagtctgcccattccattttcttcttcctgctttatcctagccgtgctggcagctggtgggtacccacccagattgagggtgggtctgcccctcccagtccactgactcaaatgttaatctcttttgggaacacactcacagacacatccaggaacaatactttgcatccttcaatccaatcaagctgacactctgtattaaccatcacacccgtttttgtttttttgtttttgtttttttttttgagacggagtctcgctctgttgcccaggctggagtgtggtggtgtgatctcagctcactgcaacctctgccttctgggttcaagcagttctccctcctcagcctactgcatagctgggattacaggcatgtgccaccacacccagctaatttttgtagttttagtagagaagaggtttcaccatgttggtcaggctggtcttcaacccctgacctcaagtgatccgcccaccttggcctcccaaagtgctgggattacaggcgtgagccactgagcccggcccacacccactttctaactagatttttttttcctgttgaattgtttgagctccttatatattctggttattaatcccctgtcagatggatagtttgcaaatattttcttccattctgtggtgtgcctcttcactttgtttattgttccctttgctttgcagaagctttttgggttgatacaatcccatttgtctattttcacttcgttgccggtgcttttgaagccttacacaaaaaatctttgcccagactaatgtcctggagcaattccccaatgatttcttctggtaatctcatagtttcaggtcttggatttaagtctttaatagatttttgtttgtttatttatttatttttattttatatatatatttatttatttattgagtcagattctccctctattgcctaggctggagtgcagtggcacaatctcggctcactgcaatctccacctcctgggtttgagcgatcctccagcctcagcctccccagtagctgggactacaggctcacgctaccacacgcagctaattttccagagcatcccaactggaaaggaagaagtcatattagccttgttcatagatgacattttttttacaatagctttatttattattttattttttagagatagggtctcactcactctatcgtccaggctggagtgcagtagcaccattatagctcaccgcagccttgatctcctgggctcaagtgacctccctgtcttagtctcctgagtagctaggactacaggtgcaccccactatgcctggctaattttttaattttgttgtagaggttgggtcttgctctgttgtccagtgtggccttgaactccttgcttcaagtgatcctcctgccttggcctcctaaaatgctgggattacaggtatgagccacctgggcaacacggcaaaacctcatgcctggcctgatatgatcttatactcgactccaccaaaaaactgttaaaactgataaacaaattcagtaaagttgcaggatacaaaatcaacatacaaaaatcagtagcgtttggccaggtgcagtggcttacgcctgtaatcccagcaatttgagaggccgaggcaagtggatcacctgaggtcaggagttccagaccagccttgccaacatgttgaaagcctgtctctactaaaaatacaaaaaattagctgggtgtggtggcgggcgcctgtaatcccagctacctgggagcctaaggcaggagaatggcttgaacctgggagacagaggttgcagtgagccccgagatcacaccattgcactccagcctgggcaaaaagagcaaaactctgtctcaaaaacaacaacaacaaatccaaaccaaaaaaaaccccaaatcagtagcatttatatatgccaacagcaaacaatctgaaaaagaaatcaagagagcagtcccatttacaatagccacaaagaatataaaatacctaggaatcaatttaaccaaagaagtaaaagatctgtacaaggaaagctataaaaacactaatgaaagaagctgaagaggacatacacaaaaaattgaaagatatttcatgctcatggtttagaagaattaattttgttaaaatgacaatactgcccaaaggaatttgcagatccagtgcaatccctatcaaaataccggcgacattcttcacagaaatagaaaaaacaatgctaaaatttacacagaaccacgaaagaccccaaaatagccaaagcaatcctgaacaaaaagaacaaagctaaaggcatcacactacgtgacttcaaaatagacgacaaagctatggtaaccaaatcagcatgatactggcataaagacagacatgtagaccactggagcagaatagaaaacccagatataaatccacacatttacagccaactcattgtcagcaaaggcaccaacaacatacaatggggggagaacaatctcttcaataaatggtgctgagaaaatcggaaaactgtacgtagaagaatgaaactagagctgtagctctcaccatatacaaaaattaaacaggccgggctcaatggctcatgcctgtaattccagcactttgggaggctgaggtgggtggatcacttggggtcaggagttcaagaccagcctggtcaacacagtgaaaccctgtctctactaaaaatacaaaaatagccaggcgtggtggcaagcacctatagtcccagctactcgggggctgaggcaggagaatcgcttgaaccaggctgcagggagccaagatcgcaccactgcactccagcctgggcaacagagcgagattctatctcaaaaaaaaaaaaaaaaccaactgtgttatcctctcactgaatatacccctttatcattgtacagtgacctgctctgtttcttttcacaagcttggaattgtagtctcttttatctgataccatatatagataccaagtatagctacccctgcttttttttttttttttttttttggtttccagttgcacggaatatctttctctaactcttcactttcagtctaagtgtgtctttataggtgaactgggtttcttgtagacagcatagagttgggccttttttcttttttctttcgagacaaggtttgtggcccaggctggagtacagtggggaaatctcggctcactgctatctccgcctcccagtatcaagtgatcctcccacatcagcctcctgagtagtcaggaatacaagtgcacgccagccaccacgcccagcaaatttttttttttttttttttggtagagacgaggttcactatgttgcccaggctggtctccaactcctgagctcaagcaatcttcctgccttggcctcccaaagtgcttggattacaggcatgagccaccatgcctggcctgggtcttattctttatccattcagccactttatgccttttaattggataatttatttccttaacattcatgttattattgataagtaaggacttactactgctattttgttgcttattttctggttgttttcttccttcttttttttttttttgagacagagtcttgctctgtcgcccagtcatgactgcagtggcgcgatctcgactcactgcaacctctgcctcccgggttcaagcaattctcctgcatcagcctcccgagtagctgggactacaggcacccaccaccacactcacctaatttttgtatttttagtagagacggggttttgccacgttggccaagtggatctcgaactcttgacctcaagtgatccgcctccctcggcctcccatagttctgggattacaggcgtgaaccaccatgcctggccccctttttttctttcttactgtcttcctttgtggttaagtgattttctctggtagtatgttttaacttgttactttttatttttattgaatctattataggtttttgcattgtggttaccttaaggcttataaaaaaatcttataacaagttttttgttttttgtttttttttgagatgaagtttcatttttattgcccaggctggagtgcaatggcacaatctcggctcaccacaacctccgcctcccaggttcaagcgattctcctgcctcagtctcccgagtagctggaattacaggcatgtgccaccacgcccggctaattttttgtatttttagtagagaagcggtttctctatgttagtcaggctgatctcgaactcccgacctcaggtgatccgcctgcttcagcctcccaaagtgctgggattataggtgtgggccaccgtgcctggcccccttttttcctttcttactgtcttcctttgtggttaagtgattttctctggtagtacgttttaacttgctactttttatttttattgaatctattataggtttttgcattgtggttaccttgaggcttctaaaaaaaatcttataacaagttattttaaagcgataacatcttagatcacaaagaaaaaaatagaaacaatgaataaaaactccacactttatctccttccctcccacattttgactttttgtttcctcaatttacatatttttattttgcttgtcttttaacaagctgctatagctattattgttttaattatggggtcttactgtgttgctcagactggcctcaaactcctaggttcaagtgatcctcctgcctcagcctcccaagtagctgagactacacccagctcaatattattgtttttgatagatttgtctttgaggctttatggtagagttaagaatgaattgcataccacaattacagtattggagtatcctgggtttctctgtgcacctaattttaccaatgggttttataccttcaaatattttctttggccaggaatgatggctcacacctgtaatcccaacactttaggaggccaatgggggaagactgcttgagctcaggaattcgagaccagcctgggcaacatggcaaaaccccatctctaccagaaagaaaatacaaaaattagccaggcatggtggtgtgcacctgtagtcccagctactcaggaggctgaggtgggaggatcactggagcctggcagtttgaggctgcagtaagctatgattgggccactgcactccatcctgggtgatagagcaagatcgtgtctcaaaaaaaattttttttctttttgcatggttttttttttttccggattgaggaactctctggaactgtctttcttcaagagagcatttcttataatacagatctggtagtggtgaattctctctgcttttatttgggaaaaactttatctcttcttcatatttgaataatagctttgcttgatacagtattcttgtatggccttcatggttttgattgagaagtctgtggccaggtaaattagagctcttttaagtgttatttccttcttttctcttactgtttctaggatcctctctttgttcttgacctttgagagtttgattattatatgccttggggtaatcaaatctatttggtgttctctggcctttctgtacctggatatttgcaatttttgaatgtcttccattgtttctttgaatatcctttctatccccttgctcctcctcagctccctcttgaacaccaataattcttagattttgtcttctatatttcgtaggtgatttccattcctttcattcttttttcttttttcttctgtatgtatttacaaacagcccgtctccaagttcactgattgtttcctctgcttgacccactctgctgttgagaacctctaatgaacttttcagttcagcaaatgtatttctcagttctaagatttgtttgggttttttttaaattattatttcaatctctttgttaaatttcactgataaatttctgcgttgcttttctatgtcgtcttggaattcactgagtttccttaaaaatgccattttgaattcttagaaagctcacatattactgtcttgttaggtttagtcactggtcccttacttggtccatttggggagctcatggttccctgtttgctttggtttgttgttaatgtacatctatgcctttgcactgaaggattagtcacttattccagccttctccgtctggcttgttttggcttttactggctccatttgcttacagattcttcgtaattgacctgttggtttctttttttctgctaggttgctgcctcctttttagcactcagtggcaccttaaaaccaggtttgccttggctctattaaagatcagagcgtctcccatcccgaatgggggaggtcccaaaggggatatcccagtagcataggaaagctggctaggggttcattcccaggggagctatggaagaaacctcccacagcatggtgctaacgaacagccactctgatttggcatctcctttggccaagttatagagtagagagagtttccagggctggggatggtagtcccacctccccactttgtctgtggctattctcagaggatatttctcccttgaggcactcctgatggttgtattcttgtgattacagcactttgggaggccaaggcaggcggatcacttgagctcaagagtttgagaccagcctggccaacatggtgaaaccctgtctttactaaaaatacaaaaattagccaagtgtagtggtgggtgcctgtagtcccaactacttgggaggctgaggcaggagaatcgcttaaacctgggaggcggaggttgtagtgagccaagatcatgccactgcactctagcctatgtgacagagcaagactccgtctcaaaaaaaatacagatcttgtgtgaactaacagaataagaactcacttgttaccgtgaggacagcaccaagtcattcatgagggatccacccctatgacccaaacacctcccaccaggccccacctccaacattggtgatcacattttaacatgagatttgagactgagtaacaagtgttaggattaaaggcatgagccaccgcgcccggccatcttctttacctctccactgtgtcagttttatttttctcttcttctctagacactttgttcctcaagatagggggcagagtgggaaaatgaccatagtcagaatctatgggaaggacccacccaaaaggaaaaggcttcttgtgcccaggctgcagatccaaaccccagggaaggactctcattggttcagtctccattctgttccaggtggagcataatgattggtccagcctgactcgtttgcccatctcttaaccatcaacatggtggggaggggacacgcaggagactgtcagctcctatcctaaacgggggagggggcaggggtgatcattttctgagctcctataaacaaagtttcagttctttttcctcctatggctggaacactggaataaggaaagaggtcgtctgtctggagaggctggttggggagtatggtctccccagcccagccaagctcaggtccctgcatacagcaggcgcctaattgatgcttatagcacgaatgactgaatgaataccccgttcccacaggctgtcctgggatggtcctaatttcacagaccctgagcggatcaagaatgaagcgggcccaggggtcccgcccaccggctgagtgcgtcttaggacgcagagacaagaccacggagggcggaacctctgagcgttaggtggcaccttggagaccccgccacctccaaaggcccagttaggggcggagcttctaaaccctagcattttggattgaaccatcgtccgtcggttaaaggggagagccgagaaagcccttctgcatttgtcgccagcctttttaccacctcctggccacagaaacgacgtatttgcttctctaacggcgacgccgtttcccccttcgcctcgttactcctcaaagccccacgcggccacagagttcagacttacccaccaccaccttgcagtggctcgccccagtttgacgcattgcagggaaggtcggaccaatgggcgccaagctctcatttccgccatgggccaggcccaatagtgacgcggctcacagagggacgcgtcacgcaccgccgagctgtgcccctccgccgaagaaagtgaagtgggcccgggaggcggggcgcgcggcgagggaaagtagtccggcgacgggagcgagcgcgcgcgcgcccggcggcaaacccaattcctgtgcagggtggggacgagagattcgcgggcccgtaggtgtggagcggggcgcggagggatccgtgggagccgcagtgcggcggcgcgcgggccgggtggggcggggccgagcgaggcggggcgcgcgcggcggccgttgagggaccgttggggcgggaggcggcggcggcggcggcgcgcgctgcgggcagtgagtgtggaggcgcggacgcgcggcggagctggaactgctgcagctgctgccgccgccggaggaaccttgatccccgtgctccggacaccccgggcctcgccatggtgagtgaggctggggggtcgccgaggctgcgggctctgaggcgggcttaacggggcaggacccctgagggggcgacagagcccagagtggggggcgtccgggcccggcgagagcctcgggacccttttctacccgcgttgtcgggggctgttgaacccagagcgggacgtctggatcaccagaggtttccagaagcgactttagcaccaaatgggatgtttaagtccacaaatgggtatctgagcccctaaaggggacatttgaaccccggatggaggatcgggaccctcagtgggacccctcaaaaggattttggacccaggatggggcgttgggtttcaggatggaggtgtttggaccccaggggacgaaataagaaagatgggctggggaggggagctattcgggccctgatgaaggcgtttggtcctgagaggatgcggggaacgggggacgaagggaggctgggctgctcctggatggggtggtggagggtagctgggcccgggcggggaggggcgacccctgggctcctgtggagcagaggagagggtcaaggatgggcggtcacttctacagatgagactcccgagggtgggggagggtgggggagggtggtctccagagcccagcactgcagaggaggaggagggtgaggtgcaagcttatgggaggaagagcctggggtgggtggcagcggagattagaagatactcttgaaggcttccgggacggagaaggatcagggtcgtggaggtggtgaaaagggatggtgagagtggggctcgccagtagtcgggggacagggacccttggggttaatttggaagtagctagaaaaggttccgaggttactagtgggttaagactgttgctctagaaagacagaatttttttaacggggtgggagtgttgtgtttgggtccaagagaagatggatttccaaggtgaggggtgggggaggacttgggcttgggtggttgggaggtgaggtggaaggagaaaatgaatggcagtcaggggggcctaggtttgggggtggatgtgggtagcaccctgccagtctccagggacaggccaggacaaagacggctcagtgtggatggggagtgggctgcagggcccggaggaagcttttctaccgtcctccttcctcaggaagaacgcggctgggtggaagacaccggggcagtgggagcaggtgggcggagctgttcgggcccctattgcgcactgaagcctcatgaaatggggatgggagatcaaagtttggggtgcctcgaatgagccagctttttcaagcctagaagcctcactctgtcgctgcccttttcaggccaagagcactgccttttcccagcaggagcgccggttttctcatgatccccagccccacgcaccatgctgcacctcgtcacttgtgccaaatgacagtgcagtacagtgtggcgtcagtgacaatcagatgcctattcccgtgccctcggggtgggggctgcagagcttgatcagagagtgcctctggggagaccccttgatcggcctgagggccacttgttccattcagggccctcgctgagcgtgtctgttaattcacagggctttgagagaaaaccagcagactagttctttcctactccctgccacccacaacacccacagccccaccaggctgagcctgggaaccgtgtgcagccatcctccctggcaaggctggggagaacaggcagccgctgctgtgtatcagatctcatacttgctgacacagacctgatggctcctcttgccgctaccccattttcccccagcagaacctggctaaaaggggccctgaagcactagcaggccccctacctccagaataggacccaagctttggccacaactagtttctctttctgtttgtaatcagcaaggtagaggtgggacaagtcactggtaactggccttggactttggcctgagctctgtggctcctccttggcccgggtgaggggccctggccttggtttctgatctcatctaacactgctctctggcattggctgggggctggggcaaggcagagaaatcacaccctcttccctcccccacctcatggttttttttcttgtccagccccttgctggagcctaagatgagggataaggaagcaggagaccagctgagttattttggaaacagtttttgttgaaagtttagtcttcaggtctagaaagggaagaaaccttgagcaaggatcaatgatatcttcttaggcggtcggttttctgggcggcaaccttgcttgagatctgtacctttccttgaccaagcagggaagtgggtctccaacatgggagggagagcatctgacaggccctccatgcagagccacgcctatttgcagcaaccctgtgacagaactgaacatggcagtgcctcatctgcatcttccagtcttttggtggagactggcaaacggtggccttcagagccgctcggggcagtctgcagcctgtcacagcctcctcgcccccacccccagccccttacagtgctgcccaaaggtccggggagctggacttcttgcagggcggaacagtgggctgggaaggccctgacctggctcgctttttccattctaggccaggggaaagaatgaaaagcagatgggatggcagccacctccccacactgctgccctcctctctgttctttccctgaccctccctgggcattgcctggtctcggtaaccagaagcccatcctcccttctcactttccctaagcctcttcctcaggtgtcaggacctaagggatggctccaggcttttttgtccatggtgggaggtggggggcaggtggatcaagaggctcatgggcctggggctaccaggttggcatttagaagcccaaccaccctgtcttttttgaaggcaatgcagaagaatcttcatttggcctccccacctcccctttacactttggacttttccagaatgtgcatgtgtgccgttttctcccttcctctttccccctccctaagccctctcccctctgtgatcatcattttgattacccctcccattctgcctatttggggcttgcaagttcttcttccgttaggttttttttttttttttctaacttttttagatcagtgattgttaatatttgggacggggatgggggtaggggaggcaggcagtggtttgttcctagcttctggaacctctccgtagaatactgcaaattcacataatagtctgcttctatttctgaggctctcagactcgagactagaacatgctatagacttggagcccctttccctgattgtgaaaggaaggggaacagacccaccatggtcccgggatggtggtgccttcttcacagcatcaacaaaaaccagggaaaatgtgtcttttggctgctaaagctaaatgttgggattcagcctccccaaccccccagccccgctcctgccccataggatcactatgcctggctgatgcccagcacaccagtgcaggagaagccagtccccgcatctcctccccacccccaaaccccgcatgcagcaagggctgcctgccacccactggccagtccccagagtgcccaagctggaaagggttaaaaactgcagtgcaagccagcttcagtcctctgctgctgcccgctgcagccctctccctgacgtttgtcccttctgcccaaaagaaacaaaacagaatggccctgtgccctcactgtgcgcagggggtggagcgcctgcctccagcctgaccagagttctttaggtgcttgagcaactcgggccgccggttaggagaatttttgccacttgggtggactctgcctgagccaaccgcctccaaataggtgacacagaaactagcagagatagccccagacatcgtccctctgccctacccaaggactggcctgcttcagtttggagccttctagagcttcttgatgaggcctccagggcaatcgttcccttcactcggcctctggggctctcactgatgagatgcaaacctgtgccaggcctcaccagcgctgctggtttggggctggggcaggcttttctcccgcccctgtggctcccacatgctgagttgagattggaagcccgtgggtctgggcagcttcatcgggccgtgcgtccagcaggcctgagtgtccagcccaccctggtacccagctttctgaatcaccagactttatcatcaggcgctggctctgcctcagaccctgactctggcatgctcctccctggcccggcgggaatggcacgtggagctggcctcactggggccgagggtctgggctgagtgaggaagatgcgtccgtgctgtccggcctggtgactgactttccccttcatgcttttacaggctgaccagctgactgaggagcagattgcaggtgagtctgctatccccctcatcttagctcaggaaagcctccacatccccagccaaatcttagccactgaggagtgacatctgatgggtgaacctgtgtatcccttgtgtcacctaacactatgccttgtgcctagaatgctgataaatgtgtgtaagagcacaccagtgccccaatgacacgaagccccatggccctgagacaggcctttaccagacaccaaaggctgtgttcctctcctgggcctgggtcatctaggggcttgatatcagtggctgcaggacgagcccaactctctctcccagcttcagccaggttggcttagaaggtgagctccctgcctccctgtggggcctgcagagctcctgtcccactttaggagccgcccaggagctggctcgtcactcccacctctgcgcttgcctgcgctttgcacttcctttcgcatgtgcctgcgcctgcctgttctgctggcggaagtgcctccccagtgctttgcatgggcagctccttcccgtcccttagctcagatgtcccctcggggaggccttccctgacccccatctcaagtacacagccttcctttactctccttcacatcactttattttcttcataacctttctcgctgtctgaaattattttcttatgtcttcacctgttgtatctcctgttactagatgtgagttccattgagtttgggacttggttttgttggtccctgctatagccttaatgcctgcctagaacgtagtaggtcctccgcaaacttttgctggctaaacaaacatctctctctcagcaagctagaagaaatccctggatcccatctaattcatttttctaacccctccaaaaccccagaagggtcagctacaggaactattgtgtaattacagatccgtgcctgcctacccgcccatactgagctgcccgaggacagagagcaactcttggtttatctccatagccaggggccagcacacagtagaccagagtagcgatccagagaatgggcctctgctccccaccagctacccagcccccagctctgctgtcaggttcaaccggctgtgtaacaagtactaaaggcccagcttctgcggtgggaggcaggaacggacttgccttctctcctttctcccctcaacccgcatcacagagtcacctttgcagcttcaaaattttggccctgggtggctatggagacccctgaggaaagccagaagatggcctggtttagtgatcatgagctcggggtgccccatgacccactcactacctgccctccccaagaacaacaaggcctcagcacagggaggtgccagcctccccaaagagactcttgccatgtccccagggcccagaggctcagggccacagcttcccagctgtgcatgtccctcccaatgcacctgccacccatctcccaactctggccttgtgcaacataaacggtctgcttttcaccctgtccccattagcaaactgtccaccgcctcaccccagcccacaccctctgggaataggctgccggacatctgtttttggagggcttgggggtagaggagcaccaggtgccaaaatgggcccagtgggagggcaagagccatgtgcttttctccctgcccctgatgcggccccagctgtggccttcccactcagcactgctagctcctcatcctcctggcttggcagccgtcccctcgctttccatccccccatcaaccccacgcactgtccgtcagccatgttctgctgccgaccacccccacgctcaccacacgcagtggctcagctcctttggaagctggtagcacccacggcaaggaacagggctgccagtcagaagggagtggatgcctgcatttcctcttcaggccggccagaggcattctgcagcctcccctcctcgtcccagccagccaaccctggctaacacactcagacaaagaatcctttcggctctcattcactccatgactttggttcatttcatcatttcaagggagaagtcaaagccagggaccaaacagaaatgtagaatcatctaaggacagctgtcagaccattttccccactgtcttcactggctggccagaaaaatagcttcacctagcacagtgttgatgttcaataactgttgaatgaaggttggaagggctttgccctgagcactgaggagagagagctggttgcgtgggacttgaagtctgtctcagtttctttaggtgggactgatgcccttggccttcctccagggaaggcatccagcatccagaggtaaggattctcctgtggaccttgtgacctctgactcctcccccttcttcccccagagttcaaggaggccttctccctctttgacaaggatggagatggcactatcaccaccaaggagttggggacagtgatgagatccctgggacagaaccccactgaagcagagctgcaggatatgatcaatgaggtggatgcagatggtgagccccacagagcgcgtgggcagccctgctcctggtcaccccgagtgactgcagggagcctctctcagggtgatggatgagcccgtgtctctcagggcccaggccaagagcattctccatcctttccccaccttccagggaacgggaccattgacttcccggagttcctgaccatgatggccagaaagatgaaggacacagacagtgaggaggagatccgagaggcgttccgtgtctttgacaaggtaagcagccctctccaggggcggctctgagactgacgccagccttcaggcagacaggcggaactggagccacggagctaccacttccaggaggtccgggtcccggtgccagcctcattgccaacctgctctgccacctcaggcagcctccctcactgtgctcactgctgagggatggtgatgacagccacccctctcactgcctctctccccaccgggagaagtgcccagtgaaaggctttatccccaacccccaggatgggaatggctacatcagcgccgcagagctgcgtcacgtaatgacgaacctgggggagaagctgaccgatgaggaggtggatgagatgatcagggaggctgacatcgatggagatggccaggtcaattatgaaggtgagtcaaggccaggcttgatctctggaacaagaagagaatcgcagcttcaggaacaagcccccagatccctcttgttggggagggccgctcgccacttagcctgcccgcctgacctcctctctctctgcttcactccacagagtttgtacagatgatgactgcaaagtgaaggccccccgggcagctggcgatgcccgttctcttgatctctctcttctcgcgcgcgcactctctcttcaacactcccctgcgtaccccggttctagcaaacaccaattgattgactgagaatctgataaagcaacaaaagatttgtcccaagctgcatgattgctctttctccttcttccctgagtctctctccatgcccctcatctcttccttttgccctcgcctcttccatccatgtcttccaaggcctgatgcattcataagttgaagccctccccagatccccttggggagcctctgccctcctccagcccggatggctctcctccattttggtttgtttcctcttgtttgtcatcttattttgggtgctggggtggctgccagccctgtcccgggacctgctgggagggacaagaggccctcccccaggcagaagagcatgccctttgccgttgcatgcaaccagccctgtgattccacgtgcagatcccagcagcctgttggggcaggggtgccaagagaggcattccagaaggactgagggggcgttgaggaattgtggcgttgactggatgtggcccaggagggggtcgagggggccaactcacagaaggggactgacagtgggcaacactcacatcccactggctgctgttctgaaaccatctgattggctttctgaggtttggctgggtggggactgctcatttggccactctgcaaattggacttgcccgcgttcctgaagcgctctcgagctgttctgtaaatacctggtgctaacatcccatgccgctccctcctcacgatgcacccaccgccctgagggcccgtcctaggaatggatgtggggatggtcgctttgtaatgtgctggttctctttttttttctttcccctctatggcccttaagactttcattttgttcagaaccatgctgggctagctaaagggtggggagagggaagatgggccccaccacgctctcaagagaacgcacctgcaataaaacagtcttgtcggccagctgcccaggggacggcagctacagcagcctctgcgtcctggtccgccagcacctcccgcttctccgtggtgacttggcgccgcttcctcacatctgtgctccgtgccctcttccctgcctcttccctcgcccacctgcctgcccccatactcccccagcggagagcatgatccgtgcccttgcttctgactttcgcctctgggacaagtaagtcaatgtgggcagttcagtcgtctgggttttttccccttttctgttcatttcatctggctccccccaccacctccccaccccaccccccaccccctgcttcccctcactgcccaggtcgatcaagtggcttttcctgggacctgcccagctttgagaatctcttctcatccaccctctggcacccagcctctgagggaaggagggatggggcatagtgggagacccagccaagagctgagggtaagggcaggtaggcgtgaggctgtggacattttcggaatgttttggttttgttttttttaaaccgggcaatattgtgttcagttcaagctgtgaagaaaaatatatatcaatgttttccaataaaatacagtgactacctgatttggctcctctcctcctgtctcagtttctggcctgcccccctccaacacacatacacaccaaccccagcactgactcctttggcccagaggtggaagagcctctcctcaaagctggctctgaagctgtgtccagtcagtgcagcccagtggacgcctctgaaccacagttctgatcccagctagatcgcagggtcatcaacggcagggtcctgtcctagagatagtcgcacaaatggactgaaaggcggggactgagaaggctcctctgaggcaggcccatcatgccatgggagcacacagagaaggggtcagcccagtcaggtggcaggactgagctgagacctacctgaaagatgggcagtcccctagccgggtaggggaaggacggaagggcattccagttcggggggacgacatgtatggaagccctgaggcaagagaagcccagacatcaaggaactgaaggaaatccagcgagactgggtgagagccccgagcagcttggagcccagccgggtgaagagaggaaggcaggggcaggccctgcagtgggtgagcctcttgatgctttggggagaggggtggcattcactgctttagtctcacaggcagccaaaacatgccaagtttggatctacagtggtgagaaaggcatggtcctgagctcacagggagggcacgggactcagtgttggtttgaagatctgaaacaaaaagcccaaaacaattgcaaaccacacaaggcagagtacaaaccactatgcggtcacagccaaattacaaaccacagaaagctcaactttctcgtggcaagtggggatgtgaggaagaagccgcctcaacagcgcccagtggcacattcctgtaatcctcctactttgagaggctgaggcaggaggattgcttgatgccaagagtttgagaccagcctgggcaacatagcaagaccctcccattccagtggggctatagtggagggatgggtcagaatcctcaagggctcttctcattctccctcgggggaatggggaatgagaggttaataagcattgtctttaacttctgagcttctcacacaggagctgggcaagggtggagcagagacagaagtcagtggaataaaaagaggtccttccactcatctgcacttggcctcagagggcaggggaagcctggcccaatcccagggccctccttgtggcagagagatcaggcctcggctgggttttcctggtgcatcccagtcaccggagccagcggcgagggtggagacattgggagtggcaggccattttccagggccccagcttctgggcccccttttcctgccacctggttgtggcttggcatttggtggtgcagtaaagacggtagagtatagtggataacttggggtctgagcaaaagcacctgccttagcattccggttccagcacttacctgccttgtggccttgggcagatgccttagagtttctggacctcaatgaccctgtccacaaaatgggggtataatggtacctgcctcctgagctgaggattggatgaggctacaggaaggaggggggtgtgcagtgctcaggaagtgttctgtgagcacctgccgccactggctgggtgcttcctgcttcatgggctgcctttgaagctctgcatccatgagctcatcggagccttaaagcaaccatttgggctggatgccattagttcccattttgctgaccaggaaactgaggcccagagaagtgaagtcactactgcaaggttatgaagtaggaagtgacacagccggaatctgaaccagatctaaccctgaggagtccaagcccacagcagctgggctttagggtaaatggtagtttaaaaacagacagacttcaggcaggccagagccagagccagtggggaggccaggctgaggctggcgtcccagtggtggggtctgaaatgggagctgcccccttagcagtaagggtacctgagaaaaattctggtctagtagttgagtcaaagatgggctgtggtttcccacaggattgggctcaaatcccaggttgagactcactcacaagagtgagtcttcgtgctcactaagtcccaaggggccacctctgccacttcaataaacttggagcagcgatttaacttcccttggcctccatttacaagtctgcaaaatggcaaaggataataatctgtaaaggaagacgatacaaatatccaccaacttgggttgtgccaaactttttttttttttttttttttttttttttttttgagatggagtctcactcttgtctcccaggctggagtgcaatggcatgatctcggttcactgcaacctctgcctcccaggttcaagtgattctcctgcctcagcctcccgagtagctgggattacagggtcatgccaccatgcccggctaatttttgtattttggtagaaacggggtttcaccatgttagccaggctggtctctaattcctgacctcaaatgacctccgcctgcctcaacctcccaaagtgctgggatgccaaactctctctcttttcgcctccccctacccccccatgcccccccttcccccccagcctaggctggaatgcagtggcgccatctcggctcactgcaacttccgcctcccaggttcaagcaattctcctgcctcagcctcctgaatagctgggatcacaggcgccacgccccactaatttcttttgtattttagtagagacggggtttcaccgtgttgcccaggctggtctcaaactcctgagctcaggcagtccgcccgcctcggcctcccaaagtactaggattacaggcgtgagccaccgcgcccggccgtgccaaactttatagacatcatttcacttagttcatacccaggctggatggactgattaaaacgcagcacccgctcaaggtgtgcggaccctgcccaggcttgccggcaggagtcactagagaaatctggcagtagaggagtggaggccgggcaggtgaagcctcttgcaccacacttactggaagcagctgagcggggtctcaaagcccagcgcactcggatcccaacgcccacgccttctcccaccgcatcccggtacccatgcttctcagcggcctataagtagtttcccccttgggccctatgttttgaaagacttttactgccagacaggctacattattaaataatcatgacttcccttcccattttttattaatcaaagacaaatagaccgcactcagcttctaatggcccctgggcaagcgctgaggggagccggctccagcccaaagaagagaaatgcctagaccgggagtcatttccagttcagcctcgcaggtctaccagaccagctcaaaacctgtcctgagaaagtgactagagaaggggacttaccagggatgcccaaccagggccgcctgggatcctcgggctcccaaggatcccctcacttcccagagggtggctctggggccactcctgagtgtcactcccagtgtgaccagcaggtggggcaatgaccacggaagaccctgaagagctgcaactcccaggcccagcccacggcataaatctgtgtgcgccggtgtttaagtcccatttgtgggtcaggccgggtgctagggagatgggaatgaataaaaagaaagaaatcgtaaaatgaatcaagtccccttgagtcccccgttcccagcacatcacttcctgagccccaccccagactagggcaggcgcctagagcagtcagcctctgtgtctgctggtttgagccaactgcagatcaaaaatattcaaaacacacagggtgcggtggctcaagcctataatcccagcactttgggaggctgaggtaggtggatcacctgaggtcaggagtttgagaccagcctggccaacatgatgaaaccccatctctactaaaaatacaaaaattagccaggtaagctgggagcggtggctcacgcttctaatcccagcactttgggagaccaaggcaggtagattatttgaggtcaggagttcgagaccagcctggccaacataatgaaaccccgttcctactaaaaatacaaaaattagccaggcggtagtggtgcgcacctgtagtcccagctactcaggaggctgaggcaggagaattgtttgaacccagggggcagaggttggagcgagctgagatagagccactgcactccagtctgggcaacagtgagaccctgtctgccccacccccccaaaaaaaattagccaggtgtggtggtgggctcctataatctcagctagtcgagaggctgaggcccaagaattgcttgaacccgggaggtggaggttgcagtgagccgagattgtgccactgcacacttgggtgacatagcgagactccgtctcaaaaaacaaaacaaaaaaaacacaataaaatatacaacttttaaaacaatacagtataattatttacatagcatttgcattgaattaggtgttataggtaatctagagatgagttaaggtataaaggaggacgtatgtaggttatatacaaatatgacaccgttgtatataaggaacttgagcatccacagattttggtatcccaggagggtcctgaaaccaatccccctaggataccgagggatgactgtctatattttcacagatccttgtactgtgccctcttagtacggcttgtgattttgtatctgagctgcttattataaaacatttctttttgagacggagtctcactctgtcacccaggctggagtgcagtagtgtgatcttggctcactgcaagctccacctccccggttcacgccattctcctgcctcagcctcccaagtagctgggactacgggtgcccaccaccacgcccggctaatttttttgtatttttagtagagacggggtttcactgtgttagccaggatggtctcgatctcctgacctcatgatccacccgcctcagcctcccaaagtgctgggattacaggagtgagcccccacgcccagccaaaacatttttttttagacagagtctcgctctgtcgcccaggctggagtgcagtggtgtgatctcggctcactgcagcatcaacctcccggacccaagcaatcctcccaactccacctcccaagtcgctgggaatataggcacagaccaccacgcccagctaatttttgtattttctgtagcgaagaggtttcaccatatcacccaagctgctcttgaactcctgggctcaagcgatccacctgcctcggcctcccaaaatgctgggattacaggtgtgagccactgcgcacgacctttgtaacacatttttatgtgattattcaatcacccacgtggattgtgaacgaggtagggccaaggctatgtcagtcaccactatattcccagtgggcacgaggcagcctcgggtccagaccagagcaactcaaggtaatgtatgttgagttaatgaatatacaggaggcttagaagggaggcatcagatgccccaagttggaggtgtaagcacgacagaaatgcttttttttttttttttttttttttttagacaaagtctcactctgtcgcccaggctggagtgcagtggcgtgatctcggctcactgcaacctctgcctcctgggttcaagtgattctcctgcctcagcctcccaagcatctgggaatgcaggtgcccgccaccacacccagctaatttttgtatttttagtagagatgggatttcaccatattggccaggttggtctcaaactcctgaccttgtgatctgcctgcatcagcctcccaaagtgctgggattacaggcatgagccaccgcacctggccagaaacccttctcttaacttgtttcactttctgctaaacctcaggtccccgctcagccatcccctcctttcagaagccctcctgcctagacacccttccaccctgcttcatgaccattctgaggacagggctgtctcccccaccaaactgagctacgggagggcagggccaggtctatctctatcactgccatgtcaccagcatcacagggacaagccctgacatacagtagtccctcaacaagaccctgcggagcgggtgagcagacacacgtccttgccatggcaggctgtggccagtgccatcgtgcagccgaaaaagttctgagggcccgctgagggaggagtggttgcatcttcaaggaggaaaaatgtaagaaagaatttgaagggcaagggtgtttttgacggatggaaaagggaaaaaacagttccaggaagagtgagctcaataagcaaagatgcgggggcccaaaatgtcacggcctctttgaggaaaccgcagccatctgttgcggcctcagccaaggcctgcaggggggtgggagcgcgggagctggccaggagcctccaggtggcgcctgagccctgggagctttccaaggctggcagggactgccagatagagctctctggacaggacccgggcagctggcagagaggatgaacttggacagtcaggggccaggatcccatctaggaggagtttccaaatcacccccgaggggcaaagggtggatggggggcattgtctgaaaacctctggcctgttagacagtgtagacacccaggtcagaggtggggtgaggggaggggtctgcagcaaacagtgagatgtcaggccctgggggagtaagagcccacagaaccccagcttctacgttgcatcctcacttccccttaatcctcatctgaaaaatgggaatgagagcagcacccaccgcaggcaaggatgctgtggtccaacgctcagctctgcctggtacacagtgagccctcagaggccagatgggcagaactgacccaccttcgggggtgacacagagagaggaggtgagcacccttcaatgcccttctccagaaccccccatcccttcctcaccatcctctgttgggggtaggagggttggccaaggtttggccaggcgtggtgacaaagtcaggtcccaatctgatgtttgtcaacctgttgtgcttttgcttttaacaagggctttttttttttttttctttgaggcagagtctggctctgtcacccagactggagtaaacatctcggctcactgcaacctccgcctcccaggttcaagcaattctcgtgcctcagcctcctgagtagctgggactacatgtgtgcgctaccacacctggctaatttttgtaattttttttttttttttttgagacggagtctggctctgtcgcccaggctggagcgctgtggcgtgatctcggctcactgcaagctctgcctcccgggttcacaccattctcctgcctcagcctcccgagtagctgggactacaggcgcccgccaccacgcccggctaattttttgtatttttagtagagatagggtttcactgtgttaaccaggatggtctctatctcctgacctggtgatccgcccgcctcggcctcccaaagtgctgggattacaggcgtgagccactgcgcccggcctaatttttgtatttttagtagagatggggtttcaccatgttggccaggctggtctcaaactcctgacctcaggtgatcctcctgccttggcctcccaaagtgttgggattacaggtgttagccaccatgacaggccagcacccagctaatttttttattattatttgtagaaacaggttcttgatatgttgcccaggctggtcttgaactcctgggctcaggggatcctcccgcctcagcctcccaaaatgcagggattacagatgggaatcacctcgccctgcctacttactttattttttaaatttttttttaatcgcagtaagatacacataacataaaagttgctattttaaccattcaaagttacaattcagtggcattcagtgcattcacactgttgagcaaccctcactactatccaattccagaacattttcatcaccccaaaggggaaccccaagctcattcatgggtgaccttgacctgtttttaactctcccagacaccccttgttctgctttattgtgatttgaaacgtggttacctgggcagggtgggggaagtcaaaacacccgaaccagagccaggaggtggtttccttttaaattgtatctgtccaaataacaatagcaacagctgcagcaatggcaatcatagtgacatttcttatgggctttattccaagccctgagctaatttgcttttcagagggaattgcttaatccccaaagccgccatgcaagctaagtgctagattatgatcaaaaggaaaccaaggtgtcccggagtggatagacgggcctgctccaagcccacgcccactcgctgtgtgagtcgggacaggtggattatcatctctggacctggactccgtcttctgtagaaaggacttattgctgggctcagaggctcccacctgtaatccaagcattttgggaggctgaggtgggaggatcacttgaggtcaggagttcgagaccagcctggccaacgtgacgaaaccccgtctctactacaaatacaaaaaaattagccagaggtggtggtgcacgcctgtaatcccagctactcgggaggctgaggcaggggaatcacttgaacccgggaggcggagtttgcagtgagccaagatggtgccattgcactccagcctgggtgacagagtgatattctgtctcaaaaaagaaagaaagaaagaaagaaagaaagaaagaaagaaagaaagaaagaaagagagagagagagagagagagagagagagagagagaaagaaagaaaagaaagaaaggaaagaaagaaagaaagaaagaaagaaagaaagaaagaaagaaagaaagaaaagaaagaaagaaagaaagaggatttataataggttgccctgtggatggagtgggaggaagcgctgcctacccctcgaagagttggctgctgttgtcctcatgggaggctcaggcctcacgtaccgcgcctctccccaagtgtggattttttgttttaacagagggggagagtaggaaaggggaactgggactggcagtgcagtggggctgggtggggggagttcccactcaccctcccccaccctaaacgcctactcacttccttccatgctcatcagctcactcctgagcaccctccatcctgggcctctctgagggcagggagtggtcatgagaagcctgtgtggatggcaggctggaaatcaccccggcagggcccagggtggagcaggggcttgtctgtgtccttaacaccaggcaatcagcactgctgaatttcagtggaaggttgagggtttttttgggttttgtttttgagacagtgtcactccgtcacccagtggcacgatctcagctcactgcagcctcaacctcccacgttcaggtgatcctcttgtctcagccttcctaggagctgggactacaggtgtgcaccaccacgcccagctaatttttaaaatttttttgtagagacaagttctcgatatattgcccgagctggtctcaaactcctgggctcaagggatcctcccacctgaacctcccaaagtgctgggattacaggcatgtgctatggtgcccagccaagtatctgttgaatgaatgaatgaatgaaatcttggtgagggctctaaggacacataacatgaggtcaggctctgcaaggaggcttttatttattcaggaccctggggacaggcacaggacttaggtttgtgttctggggcagtccctgggatccgcagcccccacccttcatctgccagcttctccatctgtctccccaccacctgcacccccccagttctcatcttgcagccagtcaagctaggtggaatgtctcaggccctttttgtaccaagcacatgtcctacgtcatcacccacaatgcagcagcctccccttcctcccgttgcccctttgggatgccagggctcccaagcctggtgggggaccagcggcaagggaaggcagggagcttttccaataactgtggtttttgtggagcagaaaggggctggctcttggagtggcttggtagagggggagggccatcccctggggacttggggtgggcagttgggcctcctaagtggacgcagattggagccagcacccagaccagagcagacctgactgtacagaagcctctgggaacttctccgccttctaaatatttagacaatgagatggatggggaatccagggccagagcaggtcggccaggccactggttattttgagagaaccattctttctgcactccaggataaacgtttcctctgtccctcactctcttcccagagccagcagcgactgccctgccgcaggagaaacagcagctgatcggccccagagtttgggggccaaggttccagcatccgcagccatcagccatgtccctgattttctggctcctgtcgcccgaagacagggcagagatcacagggtcagcttgaaatgtcagcagagggagcaggcgacgctggcttctgctttggacgacgttcccacggcgctgccgctggactgctgtgtgggaggcaagggctccacctgcccctcgccccaagccgacaaaggcacgcagctcccctcctttcccacaggagcagagggggcccttgggtccctcctccctgaggcgagctgggaaaggggtgtctgcgagtctccgtgggcaggcccgaggcacaggcagcagacccagagcttgagtcgctggaagacagccttgcggaaaaggatgaagacccaggggtccaggatggggttgaaggcgtagaagcggaaggcaaggaggtcccccatctcactgctgctgtcaggggcgacagcctgggtgaagcagcggatctgagggcagggtgagggcgtcaaggagcacccaggagtcctcagcctccccaccctggctccctcctcccacttgcttaccagggatgaggtaggggtgacatgtcagaggggaaggagataagataaagactaagtaacaaatgtatctggggaacacagggagagaaagccccaggaaattgccagagatgcctaaggggagagggatgggggccaggtatgtgggtccccccacccttggaagctgggaggaccctcgggctccacagatttttgagtataacgtccctgcaagaaggtggcgccacccggctgggccccctgaaactgccgcagagctgcggtggtgcctgtgtgtatctgtccacggcatctgagtctctgagtcagagtaacccccaaaaaagatttaaggaccccccaatccggcctggcctcttgcattttacagaaacagaaactgaagctcagaagaaaggtggcacgaccaggtgtcacagacactgagtgggtaccagggtctgtgccactcccattggggaggggcaggacggggtccccgcaggaaaccgaggtgcagaggcaagggtggggcctgctctgaggcagaggggagccaggtaggtgggagatcaggctctacaatggaaggacccaggaccaggacctggctctgtgtgactgggcgaaagacactgcccctcatctgtaaaaacggggatgggagagaacgttctcttggtttcctgccaaatactgtggaatgggtggctatgatcattttgaaaattatcttaggaagtatctgtaagccactaagcacggggcgggcatagagaagtgctcaatgagtggtggtcttgtcattacaggggtggggaaggatgggggatgcatttcatcatggggggctcaggatgcctaagctgggagacaaggtatcagaagaagtcagatgcagaaagacccctccagaaagccaggagctgtctgactgaggaccaagcctctgtctgatttgtttttgttttctttgtttttgttttgagacaaggtcttgctctgtcagctaggctgggatgcagtggtataatcacagctcactgcagcctcaacctcccaggccggagcaatcctcccacctcagcctcacaagtagctgagaccacaggcacaggccatcatgccaggctaatttttaaatgtttcatagagatggggtttcaccatgttgcccaggctggtctcaaacctctgggctcaagtgatcgtcctgcctcgcctttctttttcttttttttcttatttttttttttttttttttgggacggggtctcactctgtcacccaggctatagtgcagtggcacgatctcagctcactgcaacctccgcctccggggttcaagcgattctcctggctcagcctcccaagtagctgggacttcaggcatgtgccactacgtccggctactttttatttatttatttgttgtatttttagtagagacagggtttcatcatgttggccagactggtctcgaactcctgacctcaaatgatccgccggcctcggcctcccaaagtgctgggattacaggtgtgagccaccgcatccggtcctgcctcggcctttctacatgctgggattacaggcgtgagccaccatgcccacgatgtctcacctcttttgagcctcagtctccccatctgtgacatgggcacaacccacagagctgccctcctcctctccccactcctcccagctccggaggggactcaccgtgagaggcagggagcacacggccatgaccactgtcatgagggccagcaggatcaggtggtccacctcgtcctctccggtgcgcggccgtggacccagagagccctggtggcgcttctgctggcggtacatgcggcagaggctgagggtgaccgagccgttgcagaggaagatggcagccaccagcagggccaccaggccggcgtaggccagcgagaaggcggcgccgcccggctgggcccagcgcatgcggaggaagcaccagctgccggggcagtactgctggtgttggcccaggcccagcaggggcagcgcgcagaagaggacgcagaaggcgtagatggctggcagcgccaggcgggcgcagcggggcccgtccagctgcgcgtagaggtaggggtggctcagcgccaggcagcgctccacggccatggcaaagaggatgagcatggacgccaggccgaagaaggtcatggcgaaggcgaaggcatcgcacagggcggggccgcctcgggccaggcccagcagggagctgttgcgcgcataggccacgaacacggccgggctcaggaagctggtgcccagcaggtcggtggccgccagtccggtcaccagcaccgcgaaggccgaggggcgcgccggtcgccgtgcgctcaggatgcccagggccagcccgttgcccaccacaccggccacgaacatcagggtgctggtggccggccccaccgagccccgcacgtaggtgaggttcctgcacgaatccgccatcccaggtctgggctggagggttcccaaggtggggggtcagagggagccagggctacccccaccacccagcccactcagatgtccctgctggccagtccttttggcagctggggcctcccagccaacccccagttctcctgtgtgtgcgggtatgcagtcctctcccctctggcttctccagtatctctctctgtctctccccaccttcctgtttctctttctctctttcttttctttcgtttcttttgagacagagtctcactctgttgtccaggatggagagcaatggcatgatctcggctcactgcaacctccacctcctgggttcaagcgattctcctgccccagcctctggagtagatgagattacaggcgtccactaccacgcccagctaatttttgtattttcagtagagacggggttccaccatgttggtcaggctggtctcgaactcctgacctcaggtgatccatccaccttggcttcccaaagtgctgagattacaggtgtgagccaccatgcctgacacccaccacccccccaccacctcctgtttctttccttctctagctctgtttctgccattaaagagacagagaacatccgggcattgccagttctttccctccctgtctctcggtctcttgctgatatctccctgtctctgtcccctcccttgtccttgtcctccccgtacctttctccctctaaccccacaccctctacctgctcctgctctgtgttgctgcatccccagcccctcaccgcacctctccagtcttgcccaggctctcctgtcccgtgcgtctgtgccttcacttgctttgctcctcgtgtctctcgctgcctgtgtcggtctgtgtgtcagcttctccttccctcctccctccgtccctccctccttcccaccctcctcagcttgcctgctcaccccagctttttcatttcctctctctgccccgccctccctcactgttctccagagggccccctggcacactccccactccccgtccacccgcccaatccaggacatccatctcccatcgctgcctccactctcctccccacatcctctcttggttcccatcactgagccacctgccacctccccacacacaggtctcctccctcccccagtgtctccctctctggcctgggtggggaattcctgagtcaccatcacttaggcttggagcctcccggggtagtagggggcctctaggagggacctgaagagcacagttgaccaggcttcagtggggtggtcttggcctgggctgtctcagggtggcctctgggatctattctgggctccaggccccggggctgaggacattgcccagggattgagaaatgaccaggaaattcctctctgatgtagtgttttccagacaccactgagagttctggtccctggacacaattcactccttccagaaagctgaggaaggaggcttggccagagagagacatgccagtccctcgagcctgtccctgggcacccagctcaccctgcagagacccgagaagaaagcatgaaggggtgtatttggtgtccagttgtcagggacaggcttgggagacttccatggcccatgatggaaaggtagcactgggccaccgtccgacttctcgcacagcacccctaggccccaggccaagctctggtgaccttgaccttcaggaatcatattttgatcacaggaagctgtccacagctccaacattgctgccatgtgtcccccaccctccccaaacacagccaagccaccaccgctgcagcctcgggccagtgtgacagacccacatgttcccgctacccgcacagcgttcacgggtctcccttcccacggagtcggtggcttcccaggcagcctcccagcccaaaagggccagataaaacctcagagaccctctctgagccccgctgtttctcagggggacggtctcagatccattcgacttggcttcctgtttccatctgaccaccttttttcttgctgcgagatggtcccaggtgaggagagggagctggtagacttcagcctccttctctgtgcgtggggtaacacgggcctcagggacctggtggccagcctcggcctgcagcacatcccagattggtctttgtaacaaggagagaggctgtgcgggtgtctcttgtccaaggccaggagggatgtgtccaacccaaggactggactgtgggcagctgccgtcttgccctctgtaccccggtgtgtgaccacaacccctttgcccctcccccccatctccctatcacccttgcccagctggcacccgcagcttccagcaggatggacgcccaagttccagccccaccgtggctccctaagggaccccccagccctgctctgggggtgcctgtacatgtgggctccaggtcctgccacgttgtcccgcctcatgccgtgaggtccccagacagaccagagggaactcaggaagttatatcatattaatgaaggatgatgcctggcaggcgtgcatcttgtttcggcatcgggggggcctctggttcccggagactccctctctcgcttcctgttacaaggacggttaacattcaggaagtcccctctgctcccatgcccagtgggaccacagtcaaacccttgtcccttccaggcctcagtttcttttttgttgttgtttttctttttgcttgtttgtttttgttttgagatggaatcttgctctgtcacccaggctggagtacactggcatgatctcagctcactgcaacctccgcctcccgggttcaagcgactctcgtgcctcagcctcccgagtagctgggattacaggcatgtgccactgcgcccaatttttatatttttagtagaggtggggtttcaccatgttggccaggctggtcttgaacgcctgacctcaggtgatccgcccgcctcggcctcccatagtgctgggattacaggcgtgaaccaccttgcctggctgttcgtttgtttttgagacagggtcttgctctgtcacccaggctggagtgtagtgctgcaatctcggttcactgcaacctctacctctggggttcaagcgatcctcccacctcagcctcctgagtagctgggactacaggcacccactgccacgctagctaatttttgtatttttgtaaagacagggtttcactgtgtcacccaggctggtctcaaactcctggactcaagtgatctgcctacctcggcttcccaaagtgctgggattataggccaccacgcctggcctcaggcctcagtttccccgccgatgccactaggagtcatgagccctcgcaaccccaggatcggttctgtgttcctgcatcaggagcaggtaggggtggcagtgactgtgactccctcctaatgaggggactgagttccccagagtccgtactggcgccagacatgcctcagtcaccttgccctgaaacccagcctcctgcttggccgtggccccagctagccgggccaagcccacagcagggtccacacgggggttccactccccagccaggtgccttggggtgagaaatcacccacggtgcgttgtgccaggggcagcttccagggtgggcggagctatggaaggaactgccctgggggcgtgggtccgtagcctccatctcacactctctccacccatggcgaggaacaggaccaggcctccctgagggggaccctgaagcagcagggaaaaagaggaaggacagctcagagaccactgagattagggacgcacacacagcacccgggaggggagagagattgaggctagtgtgctggggactgtgggtgtgtaaccggattgtgactctctgtagagttagtgcggcccatgtgacctaagtgagcatttttctcagcattgattgtgtttgcgtgtgtattgtgtgtatatgtgtattgtgagctcgtgggactctgtgtgcacatgggcacacagctatgttgtagttttgttttgtttttgagatggagtcttgctcttttgcccaggctggagtgcagtggtgccatctcggctcaccacaacctccacctcccaggttcaagtgattctcctgcctcagcctcccgagtagctgggattacaggcacctgccaccacgcccagctaatttttgtattttagtacagatgggatttcactatgttggccaggctggtctcaaactcctgatctcaggtgatccgccggcctcagcctcccaaagttctgggattacaggtgtgagccaccgtgcgcaacctagtttttttgagacagggtttcactctgtcacccaggctggagtgcagtggcacgatctcagctcactgcaacctctacctcccaggcttaagcaatcttcccacctcagcctcccagatagctgggaccacaagtgctcaccaccatgcccagctaatacttttattgttttgtagagataggatcccactatgttgtccaggctggtctcaaattcatgggctcaagtgatcctcccaccttggcctcccaacgcactgggattactggcatgaaccatggcacctggccgagaatggtttttggtttttttgtttgtttgtttgtttgtttgtttgagatggagtctcactctgttgcccaggctggagtgcagtggtgccatctccgctcactgtaacctctgcctcccaggttcaagcgattctcctgcctcagtctcccaagttgctgggactacaggtgcgagccaccatgctcagctaatttttgtatttttagtagagatgggatttcgccatgttggccaagctggtcttgaactcctgacctcaagtgatctgcctgccttggcctcccaaagtgctgagattacaggcgtgagccaccgcgcctggctgaggatgggttttgaagttcatctccaccactcaccagtcagtcaccatgtgacctgagaaaatgacttcccctagcaaagctttgatgttcttcgtcaaatggctgccttgaccttgttggggtgttatgtgaagataagagacagttccccctgcctgcctcccaggaagccctcaaatagctgttgatattattcattcaacaaaccgtaaccagcagtttactgtgtgctaagagctggggacacagaggggctcagagggcacagcccaggaagagtgttctcaaacaggtttgtccacccagtgtggggatcctgagcaggggtgcctgcatctgtttttttttgttgttgttgttctgagatggaatctcgctctgtcgcccaggctggagtgcagtggcgagatctcagctcactgcaacctccacctcccgagctcaagcgatgctcctgcctcagcctcctgagtagctgggacttcaggtgcccgccaccatgcctgactaatttttgtatttttagtagaggcgggatttcgccatgttggccaggctggtctcgaactcatgacctcaagtgatccgcccaacttggcctcacaaagtgctgggattacaggcttgacccatcacgcccagcccaggcctgcatctggaagtgccgcagacctaagatcctggcttgccctgggcctgaccctctccggactccctggtttccgtcctcctggctctggccctgggaggaagtgggccttatctcatgttctgcacacacgcaccaccagctgctcgtgcctgccaggcctcccgtctgcctgctgtgccctctcactgctttgagaaactgctatgtgtgtcccagacctgtctcgccttggctggttccagcatccagagccagaggcctcctttctctatccactcactgccctccaccgcaaatgggccctggcctaccttctggtggctgcacctcaccttgctccagggggcataacccagtctcctgcctaccctgcctctgaatgggccgtgcccctcacctggggatcccctcatttcctagccttcaaggcctcttggtcaccccctgagcctctcctgagcggtcgtccatcagatcctcccactcccattccagtctcaaaccccagctggttacctctccatgcctgtttctctctctctctctctcttttttttttttttttttttttttttgagatggagtcttgctctgtcctcaggctggagtgcactggtgcgatctcggctcactgcaacctctgcctcctgggttcaagcgattctcgtgcctcagcctcccgagtagctgggattacaggtacacgccaccatgctcagctaatttttgtatttttagtagagacggggtttcaccatgttggccaggctgtcttgaactcctgacctcaaatgatccgcctgccttggccttccaaagtgctgggattacaggcatgagctactgcgcccggccccatgcctgttttccttgtctgtaaaatggggataaacagagtcaccttgagggctatcgtgagcattgagcaagatgggactgttgaactgttcccctaggaagcgatggccaagattgcagctcctgctggctctaggctttccctcccccgctgtactccttcggccaagccaagcgctgctctgagcgcctgggttggggtgcagcgtgcgatgtgggtgcagagggaagacagcctgaaacagggcagctgagagcccttggggtctggaggaacaagcacctcgccctgcatgcacctctacctcttggcctgtctctgacccccagcatgggcctggccccagagctgacttcacccctgggggtggcaggaagcagcagctggtgaccagaagctggtgctgctacaaggcagtaaatttaataagattattcggatctgttctcatggaggctgggcacgcagggacctgccctgtccctcctggattgtgacttctgacttctcctttcccgtagcctcagttccccatcctccccctccagaaagacacctccttctggtcccctctgtgtcccactcccaccagccctcccttcccccaacccaggtcccattcagctgcttacatctccatagtttctgtcccccaggaccaggaatgtgaaggaggaagggtttgcactacgcagctctgagattccagggctcgaaggatctagctcccaagagcctaggctcaggaactccttacacttcttctgagatgctgaactctggaatcctagggtgcaggaccccaggatcttggccccataggattgaaagatgctggaattccagccctcagaggtcctgggatcctagattcctttgcatttcaggttctgagctgtaaggatgcaggatctgtgaattctggaatccttctagctccttcctgcccagcttctctccccgctcctcctccacaccctagctcatctctggctcactccctgtcccccgtctcccccggggctcccacagacatgatgcaaccaggccggagccaagccagctcagaggtgggaagcaggagggagatgtaattacagacgctcctgcctggatcctacaggaaactcagagtaggggcccgggggaccctaatccaatgtgaataatggagcagacttgtgcacattccccctgtggaggggaggcccagcaagccacctccagccagacccagggtccagcctccaccagccccaagctggggagcctgagtattagacaagataagaagagatgagggagaggagagggggtgatcctccagcccttgggccaaccaggtaaaataattggccaaacctacagcttccctggcctgcattctccccattttcaatggagacacagaacatttcatttttcttttcttttctttgcttttttttcttttgaaatagagtctcactctattgcccaggctggagtgcagtggcgtggtcttgtctcactgcaacctccacctcccaggttcaagcgattctcctacctcagcctcctgagtagctgggattacacgttcatgccaccatgcccagctaatttttgtcttcttagtagaggcggggtttcaccatgttggccaggctaatcttgaactcctgacctcaagtgatttgcccacctcggcttctcaaagtgctggatttataggcgtgacccaccacgcccagccattttatttctcattcctccataagaagcccccgacacaggcttcaggttaaatggcaactggtccccagcttccttgaccagaagacaatagggcatggtggggactttggtgagctggaaagcccaggcaccgtctcacagcctatgcgtcaccagaccttacaatttcaaagaagactttgcaattccagaggaatatggactttgatgtgaaatatctgtgtttttcaattggcagccaagtcaagaacatctttaaacatcatgtaaagccataaaaatataactgcggccaggcgggtgggtcacgcttgtaatcccagcacttgggaggccgaggcaggcggatcacttgaggtcaggagttcaagaccagcctggccaacatggtgaaaccccacctctactaaaaatacaaaaattagctgggcgtgatggtgcatgcctgtaatcccagctacttggggggctgaggcaggagaattccttgaacctgggaggcggaggttgcagtgagccaagatcctgccgctgcactccagcctgggtgacagagcgagattccgtctctctctctctctctttctctctctctctctctatagatagatagatagatagatagatagatagatagatagatagatagatctgcaagctacgtatgtcctgcaggccagcagtatgtgaattggaaaacagagggcaggaaccagagctgtcacagtcatccctttgtctccagaaaaatgacaaaatagaagaagaatgaaggaatgtactcattattttctttcctctccctccctctagccatgtttctctcttctgggtccccaaattttattaccaccatgttccagctcagatgtcacctcctccaggaagccctcccttacctccaagctgagtcaggagttatctctgcgctcccccacccagcactgcgcactctgggtttttaccatctggggacaggtctttctctcctactggactctgagccccaagagggcagggcagggcagagccaaggctgtcttggtcacagccatgtccctagcattgcccagcgctggtcagagagtaggtactcagggagtgtttggaagaatgaatgagtgaatgaacaagtgagcagggaaaaagtgcagggctttaggacagaagtgggcctgcggtagaggggaaccaggtgtgaaaacaggagtcgttaagggggtgagaagtgtgggatggggactggggaccctaagaatgtccaagccagtggggaggagaggagagaggatggcggaggggttcagggagcactggagtacccccgtcagcgctctgttaccgcctagctttgtgactctgaataaaggacttcctttggctcagtttcctcttgggtatcatacaagtagttagctgtcttctggggctgtcgggaccattaagttcaggatcgaccgtggaggagagagcaccgaatactcatctcctccgaagctttggtggagtcgtactccctccacgtccacccctacccccaacacacacactcagaaggaatgagaacggacacagcttcccctacggtggccccaagctctgtgcgtgcctcagtctccctgaaagcacaggcaccaccacagttaccaagtttattggatccatactttggcaggggagggtaagctgtccggagggctcagagcagaacacaaaagaggcgcttgtcgcggaaggggttctccgcggcgggtactggcgtcaccagcgggtcatctttggcatgcgtctcgcagaaagccaggagttccgctgctgcctgcgacacctgcgagcacccgggtggagatgtcaccgccctgcccggctccttggagccgcccacttaggccccgcctcttgccctgtcccctcctcccaccttgccccgccccatacaggcctttccccttgtcttactccgccccctcgtcctggcccctcccctgtcctaccccgcccctcgtcctggcccctcccctgccccatccctcccctcgtcctggcccctcccctgttctgcccctcccctcgtcctggcccctcctcctgccctgccccgccccttgcccagccctgttcccaggggcatccttgcactatggctccgagccgggccgacacagccccggacagaccgcaggcccagaacccccgccctattccccaccccgacccagcaccttcatgcggtcgatgttcacctccagcttcagctgttccaccgtcttgcgggcctcggcaatcttggccatgttgttggacatggttgcggcggggaaggggttaaaagacgcgcgggagtgggggctgtgggggtaggttaggatacgtctgggtcccgaggtgggggcgagagggcgggccccggtaacaggtgcgagggtggaagggcgcgtgaatggggtggccaggggctggtggagggagggacagatgaaggggacaggaacaagaggagcgatggaggggtgcacggatggaggtagctaaggcaggtggggagagagcagggaggggcgagggagggaaggaggggcgcacagatgggaggctgagacagaaggacagggccacaggtgctggatcagaatccaggtgtcctcacccccgggggcagagcgagagccaggaggggggcccctcccccaggccaattagcagtggctccagggagaactgggaattaagatcgcggcgggaggggcacagagggggcctcattagggccttggcagcagctgccctctccgccaccctcagggagcccccccaccctagccctggtcacctcaaagcctcctctgctcattagcagccagggcagagggctgggggagcccaactcgggcacctgaggagaggcctatcggatggacagagggacaacgggacgcgcagaggcagagacagagtaatggagggagagactgaggcacgggagaaatgaagagacggggaggaatagagagagggagagactgggggaggaatgaagtgatggaggagaaaatagagggacaaatgaaggggggagcaaggaacagggtgatacaaggcgacaggcaccgaggggacaaagggacagaggggacagagcaggggagatggagggagggggtgtggggtgggagaggatggggagatggagggagggggtgtggggtgggagaggatggaggagatggacggatggggtgggagaggatggggagatggagggagggggtgtggggtgggagaggatggggagatggagggagggggtgtggggtgggagaggatggggagatggagggagggggtgtggggtgggagaggatggaggagatggagggagggggtgtggggtgggagaggatggaggagatggacggatggggtgggagaggatggggtgatggagggagggacgaaggagagagaaggggaaatggaggaaggggggagggaggaaggagcagagacaccaaggagataaaggaacagagacggggagatagagggacagaggaaagaagggaaggacaaagagggagatggaggggttggggagagatggaaacagaaagtgggagagaggaacaaggcgagagacaggctgatggagacgcagaagaattcattcactcactcattcactcattcactcattcattcccaggcggagagacggtggccacggagcaggcaaagggaccagctgtggggccgggaccggagcttcctacctgttgctgctctgggccgggctcgcggcggtgacagaggctgggaggcagcgtctgggtccctccggcccgccccgccccctcccctggggcgcagcccctacggacccgcctcctcccggagccaccgtccccgccgccccgccaccttggggctccctctctgggccctctctcttgtctgtcagtcctatctttgtccctctccctgtgtctctgccgctgctgtcctattgtgtgactctctctgtgcctctctcacactcactagaaaacacagtctctctaggtgggccccgggcctcgctacatttaatccacagtcacaacaaacctctccagtgtgtcccacagagccgctcactcagccacactcgccacctcggtgtcaccacccccctccagcctcatgctcactgtccctcacacagacaaaaactatcttgccctgtcacacggtagcaccacacaacctcacgaatgaccttgctcaacacaacctcacacggttgccccaaatgccacacacagccgccaccaatggcagctccaagcgctacacagtcagataaattatctcagagcaccaaatgtaccacagtgtcacacataatgtctccaaatgtcacacacatttgcatgcctttttttttttttttttttgagatgaagtctcgctgtgttgcccaggctggagtgcagtggcccaatctcagctcactgcaacctccgcctcctgggttcaagccattctcctgcctcagcctcctgagtagctgggattacaggtgcctgacaccacgcccgtctgatttttgtatttttcgtagagacagggtctcacaatgttggccaggctggtcttgaactcctgacctcaggtcatccacccgcctcggcctcccaaagtgctgggattacaggcgtgagccaccgcgcctggccttgcatgccatttaaactctctcaatctcacaccctgtcccagtctcacactttctgtgtctcacggtggcatgcaattacccaatacaacctgtcaagtacacactgttttatagtatttcatagtaacacccagtcgcctgtccagtgacaaccatggaaggtcacatacattctctcacagtctcctggtgtcacacgcatctgacacattccctccatacacagtctgtccctgtcacacacacgcacgcaacccatctcctggtgtcatacctagctacccacgatggctcagtgtctcacagagtcccacacaagctcgcagcgtttcacacactcactcccacctctccatcatctcttgccttctacacacaaggcctccctcacgctctcgcttccgagtgccctgcacagccgcaaactctcgcatgcactgtcacaacgctgccatctctcaccagctcagtgtcacacatagtcacgcagttttgttttgttttttgagacaaggtctctctctctgtcacccaggctggagtgcagtggcgcgatcttagctcactgcagcctccacttcccaggctcaagcgatcctccaacctcagcctcccagtagctgggaccacagaggtacataaccgcacctggttaatttcttttatttttattttggtagagacggcgggggtggggggaggggtctccctatgttgcccaggctgatctcaaactcctggcctcaagggatcctcccgcctcagccacccaaagtgctgggattacagcaatgtgcccggatcacgcactttttcacaagccatacacagagtggccaacacagactgacactcactgtgtctgtcccacccaggccccctatgtgcctctcatgacacctgcccacaccacctctcagtgtacatcagtcatcagtctcactctctctcacacagaatctacttgtgtgacacacacagcaccgtatgctcaccatgttgcacacagccacacacactgccccctcacacgcaccgtcacacacggtctctcactcccacatacggtctctcaatgtcccatacagagccccaaagagtgtctctcccacacccgatcacacataacctttcatcagcacacacagtcacccacaatctctcagcatcaccagtaatctcagtgtcacacacagtcagcgacatgtcatctctgacatatgcagtcccactcagtctctccttgtcgcacataatctcatatcaatcagtcacacacagactcccagcaccacacaccatctcaccagtacaccatcatggcagtacacactcatggtgtcctggtcctggcactgcacaccatctcacggcagtcgacactcacacagtttcctggcgtcgtacaccatctcacagcagtacacactcacagatctcctggagtcacacaccatcacggcagtacacactcacacactctccagatgtctcacgccgtctcccggcagtacacactcacacagcctccaggtgtcacacgccatttcccagtgtcaccgcgaacaccagcgtcccccgctccccagcactccccttttggcgctcacacgcagcgtctgccggccacatgagggcgcgcgcagcacgcccaggcgcccaccctgccccgagaggccgcagggaggaggtggccacagggaggagggccaggcgggagatgaaggggagactcgggaccagaggaagcacggcagggagccagggaccggagggagaggacagaagatggacacagagaaattcacagacaggggagggagatgcagggagagtcagagagacgcagggggctatagggacacagatttagagaaggagcgagctagggactcagagagacagagacggggagggcgctgcggagagagggacaggagaggcagagacagacaggacacagagagaccggggtaggagagagacacccaagccgaaactcagagacagggacgaagacgcagacacacagagatggaggcagaggcggccagagagacaaagagatgcacagagggcgccttccagtggggacccgacgacggaggcggggcctgcagaggcgcgaccgaaggggaggggtccggggcggggtttctaagggggcgtgcccctcggtgtacctgggggcgtgtcccgatggacggggcttggggttctttctggacctggagaaggcgggagccctaggaagaggtggaggtggggaggagcatctttactgcagtcggcccaccctaactcggttttcaccgcctggacagggaagggagacgggcggggaggggaccccgacccgagtccctggtggagatttgggtctcggaccctagctcccctcccccctccccttgcgggctcaacggggccagataaaggagggaaaccaagcccacatctggaaagcatcaggcgcgccggacgtgccagggccccaggcccggctgcggaagaggggaggggagccaaggcgctcctcgccccgccatcggggtccgccggcgccgaggaggggcctgggcgtgtgccgagcctccgcgcctctcgcagctggtttctatcagcagtctggcctgggcagcccccgaggaggaaaccagctcagagagggggaagacagggtgacgatccagtcttccctcccgctcctccaccgcggccagaagctgggggatgggggagacggacagacagacactgcctgccgtgagcgcagcctccgttcctctcctgagctgcagaccgcagcagatgacctcagttcctgtcctgtgccccagcctcatgacagcctagcgcttgaaggcattacagtccccattttttggaagaggaaactgaggccctggattcggattccgttctgacgttaattattcaagaaatcatcaacaaacggcaagagtgaattccaggatcaaatacccagccgcctgggtgtttagtgggtctctcgagctcaacgcatccaatactgagctgattccatcgaccaaaattcgctcttatttcaggtttacccatctcaagtgatggtaaatctctgagtttttgttgttgttttgaaacagggtcttgcctgtcgcccaggctggagtgcagtggtgcaatcatagctcactgcagcctgaactcctgggctcaagtgatcctcctgcctcagcctccccggtaactgggactacaggcatgcacaaccatgaacaggttttgttttgttttttaacagaatctcactctgtcactcatgctggtgtacagtggcacaatctcggcgcgctgcaacctccgcctcccaagctcaagcaattctcatgcctcagcctcctgagtagctgggatcacaggcatgtgccaccaaatccggctactttttttgtatttttagtagagatgggatttcaccatgatggccaggctggtctcaaactttggcctcaagtgatccacctgcctcagcctcccaaagtgctgggattacaggcgtgagccactgtaaccagcctaactttttatttttttttagaggcagggtctggctatgttgcttaggctggtcctgaactgtgagccaccacacctgggctggggtcatccttgactccccgccttctctcacactccacaagtcaccaagtaagacatcctgttggctttatcttcaaagcaattccagaatccaatccctctcacttcctctgctgtccccacttgggtccagacaccgttccctcctgcttggactattacagtgacctctgcattgacctcctatcttctccctgtccccctcagcctgtttcccacagagcagccaaaaggacactgtttcaaactgtccccatataatagcaagtgagtatgtggagcaacctgaaccctcataagctggtggggatgtaaaatggtgaagtcgctttaggaaacaacctggcaggccgggcgtggaggctcatgcctgtaatcccagcactttgggaggctgaggcgggcagatcacttgaggtcaggagttcaagagcagcctgggcaacatggtgaaaccccatctgtactaaaaatacaaaaattagctgagcatggtggtgcacgcctgtaatcccagctacttgggaggctgaggcaggagaatcgcttgaacctggcaggtgaaggttgcagtgagccaagatcgcacgactgcactccagcctgggtgacagagtgagactctatctcaaaaaaaaaaaacaaaaaaaaccctggcagttcctcaaaaggttaaacatagagttaacgtatgacccagcaattccactcctaggtgtatatccaagagcaataaaaacatacaaacacgtatataaaaatgttcacagaggcaatattcataatagcccaaagtggaaacaacacacgttcatcaactgatgaatggacaaatgaaatgtggtctatccagacaatggactatcaattatttgtcaataaaaggaaatgaagtactaatacctgctacaacatggatgaaagttgaaaacagtatgctggctgggtgcggtggctcacgcctgtaaccccggcactttgggaggccgaggcaggcaagttgcttgagcccagaagttcaagaccagcctgaataacatggcaagaccctgtctctacaaaaaaacattaaaaaatcagccaggcacggtggcatgtacctgcagtctcagcttcccaggaggctgaggtgggaggatcacctgaacccaggaggtagaggctgcagggagccgtgattgcaccactactctccaacctgggctaagtgaaagaagccagtcactaaaggcctgtattgtatgattccatttatatgatatgtccagaactagcaaatctatagaaggcaaaagtagattactggttgccaggggctgggaaggttggaggatggcagctgtggtgcagggtttctttaggtggtgatggaaatgttttagaattcattgtggtgatatttgcacaactctgaatatactaaaatactggttttttctttttttttgagactgagtcttgctctgttgcccaggctgaagttcagtggcgtgatctcggctcactgcaagctccgcctcccaagttcaagagattctcctgcctcagcctcccaagtagctgggattacaggcgtgcaccaccatgcttagctaatttttgtatttttagtacagatggggtttcaccatgttgcccaggctgctcttgaactcctgatctcaagtgatctgcccacctcagcctcctaaagtgctgggattacaggcatgagccaccacgcctggccactaaaatactgaatgtcttttatattcaatatatttaaaaacattgaactgtatactttacgtgggtaaattttttggtaggtgaatatatctcagtacagctattaaccctcccccccaccaaaaaaaaaactttaaaaactctcttttatatgctcagaattctcccatgggtgccaggaaataaaaaccaaaatccccaccatagcccacgaggcccccatgatgtgacagtccttacctcttctccctctcacctccccactccagctggcctccttgctgttttgccaacatgccaggcagagttttgcctcagggcctttgcactggctatttcctctgcccaggatattcttccccaagatattcataagtctcactcctccacctccttcaggtctctgttcaaatgtcatcttctcaattagaccattcttttttttttagacggagtcttgctctgtcacccaggctggagtgcaatggcgcgatctcggctcactgcaacctctgcatcccgggtacaagcgattttcctgcctcagcctcccgagtagctgggacaacaggcacatgccaccacgcctggctaacttttgtatttttagtagagacgaggtttcaccatgttggccagggtggtctcaaactcctgacctcaggtgatccacctgcctcggcctcccaaagtggtgggattacaggcatgagccaccatcttctcaattagaccattcttgatcactctacttaaaattacacactcccttggccaggcacactggcttatgcttgtaatcccaacacttcgggaggcttaggcaggaggatcacttgagactaggagttggagaccagcctgggcaacatggtgagaccctgcctctgccaaaaaaaataaaaattagccatgcatggtggtgtgtgccaagctgcttgggagactgaagcagaaggatccctttagcccaggaggtcaaggttgtagtgagccatggttatgccactgcactccagcctgggtgacaaagtgagaccctatctcaaaaaataataagtaaaattacaaactccccgcttcaccaccccacccaatcccctcatatctctggtcagtttttccctatagtcatcacctttaacaaactatagaatatatttattatggtaccaccaccaccacccccagcttccctccctgggacccattcctggtatatcctttttaagatcatggttccagcaaatagaccatgtagggcactgactaaggccatgaactctgaaaatagtgtgcctgaatttgaatcctggctttgccacctatgagcttcagatacatttttgtttgtttgtttgtttgtttgtttttgagatggagtctcactctgtcacccaggctggagttcagtggtgtgatcttggctcactacaaccttacaacctctgcctcccaagttcaagtgattctcctgcctcagcctcccaagtagctgggattacaggcgcccaccaccacacctggctaattcttttttttttttttttttttttttgagacggagtctcactctgtcgcccaggctggagtgcggtggcgcgatctcggctcactgcaagctccgcctcctgggttcacaccattctcctgcctcagtctcctgagtagctgggactacaggcgcccgccaccgcgcccggctaatttttgtatttttagtagagacagggtttcagtgtgttagccaggtggtctcgatctcctgacctcgtgatccgcccgcctcggcctcccaaagtgctgggattacaggcgtgagccactgcgcccagcctccacgcccggctaattttttaattattagtggagacagggtttcaccgtgttggccaggctggtctcgaactcctgacctggtgagacgtgactttcaccttccgccatgattgtgaggcccccccagccacgtggaactgtgagtctatgaaacctctttttctttaaaaattacccagtctcaggttatatctttatcagcagcatgaaaacagactaatacaggtggagaggattaaatgggtcaatatgtgtaaagtggtgagaatagagtccagcacgtcataagtgctcaaataagtgttagctgttattttttgtaagcactaaaaccttaaaagggagacccttaaatatccatccatatttacttcaaccattttggccactaagtgacctatgtagccctagacaaacaaatctcttctcctttctgacttcagttgccccttttatggaatgaagttggagtaattgttcccaaggacctgccaagcaatagcttttcctggaaaaacttttaaaaataacttttattcattattactctaagtgaaacataggtctatccctcaccctacccccaccatagaagctccgtagggcagggtttttttttcctgttttgtcccctgctctaaccccagtgcctggctgggcgctgaagatacaagtgaacacagcaggcctggtccctgctctttccgagctcaaagggaggtagatctacccatgcagattcaaaggtcaaagcagcaacacacaccccatccttctgactgtggattcaggtgggggctgggtcctagccctggatcccccttgctttgtgaccagggaaagtaatggctcttctctaagcctccatttacccacctgagaactgagtataattttacatacccaatagaaaaacaggacgagcacggtggttcacgcctgaaatcctaacacttttggtggccaaggtgcaaggattgcttgaggtcaagaattcaaggccagcctgggcaatatagtgagagttcatctctacaaaaaattggaaaattagccaggcgttgtggtgcatgcctgttagtcccggctgctcaggggggttgaggtgggaggattgctgaagcccaggagttcgaggctgcagtgagctataccactgcactccaggctgggtgacagatcaagaccctgtctcaaaaaaaaataataaaaaataagaaggaaggaaagaaggaaagaaggaaggaaggaaggaaaagagtaaaaaggcaattcacataagaggaaatgcaagagccaataagcacccaaaactatgtgttacctcaaggaaaagggaggaaacgtgctaattaaaacagaacacagtttctccccataagatttgcaaaatgaaaatgatcaatagcatctatcgtttggtgaaggggtagaaaacagacatctgaaaaactgctgttagaaatgtcagctgggggcagtgctaatggatggaagtgtggcagtgtccattaaaagttcttaaattggcatactattaatgaccaagcaactctatttctaggaatgggtcctataaaaatacacacagacatgcacaaagaggcaaatacaaggacattactgtagcaagattcataatagcaaaagaattggagagctgacaatagggttagattatgagaatccccataatggagtcttcttttttttttttttttttttttgagatggagtctcactctgtcacccaggctggagtgcagtgcagtgatcttggctcactacaacctacacctcccaggttcaagtgattctcctgcctcagcctcccgagtagctgggactataggcacacgccaccacacctggttaatttttgtatttttagtagagacagggttttgccatgttggccaggctggtctcgaactcctgacctcaggtggttcacctgccttggcctcccagagtgctgggattacaggtgtgagccacctcacctggccataatggagtcttatatgcacctatcaataataatatagtgataggaaaatgtgttacctaaatttagatgaaatgggccagacatggtggctcacatctgtaatcctaacactttgggaggccaaggcaggaggatcacttcagcctacgagttcaagaccagcctgggcaacataaggagatcccatctctacaaaaagtttaaaaatagctgggcagggtgacgtggacctgtggtcccagctactcaggaggctgaagtgggaggactgtttgagcctgagggttgatgctacagtgagtcatcatcacaccactgctctccaccctgggtaatagagcaagaccccatctcaaaaaacaaaagaaaaaataagtagatttagacgaaatggacaaattcttagatgaatagggcctagcaaaactgacacaagaaaaaatagaaaacctaaatagtactataactatcaaagaaattcaatccttaatttaaaccctcctcataaagaaatcttcaggcacagagatttcacacaaagaagtgataaacactgcatacatatagttcaatttatgtaaatatataatttcacacatatattacatatataactatatgtatattcatacatatatatttatatagttatttagattcatatatatatgcaaacacataaacatgggaggatgcacatcgaactgctgattatgatgaccgtcagagaggggatttaggggctgtctgtttcccatgctgttcccatttttgtgaaaccatatttttttgttttttgagacagggtcttgcttgtcatccacgctggcgtgcagtgacacaatcatggctcactgcagcctgggcctcccagactcacatgattctcccacctcagcctcctgagcagctgatagttcaggaatgacctaccacacccagctaatttttgtattttctgtagagatggggttttaccatgttgcccaagctggtcttgaactcctgggctcaagatatccccctacccctgcctcccaaagtgctgggattataggcatgagccatcacatcccgcctgaaatcgtatttataaccaaacataacccaatcaaaggttagattccttgatgtaaaatagccaatggtaggaagatgatgttgagattcaccctgggacctccctggaaactgccatatccacagcaaacagaagttgctcaataaatgttagtccaaaggaaaaagagcatttctcccatttaatcattcagtgagagtccaccacatatgttacactgtgcatttatttacaaagaggttagagaaacacacagaatctggcccccctttgcactggggagtcaccatcgtcataataaatacagtaattttaaaaaagaaaaaaaatactagattggaacagctgagggtcatcaggcttcccccattccctctcacagggagtgggggtcatgagatagaaaccatcttccttcccctcttctacctccgaatcctccataattgtccagggatcgaagtgaaagagtccttctttccaggtgttaccaacccctacttgaccctcaaaacccccaaatcagtgctccttcccttcccagggcactctgcagggaccacctgagtcagacacagagtctctgaccagggtgccaaggggatatcttaagggtccagggacatggagggggcactttgtgaatgagagggggccatagctgggcaaggaaaggaggaatgagagggctcatcaggaatgagagggagagcggtggaggggaacaaacagactaggcttctaaactaaaacggggaaattcaaaccgaattaccccttttgcatacatggacacttactgtacagatgaggaaagtgacgcccagagaaggggaactgtcttgcccaagggcttccaagctagaagctgaactgggtcaaacagggctcctccccattcctctcggtggtggtgggggagccttttcaaccaagactgttaggagtggggagagtgaggggggtctttggaagcagagaaaacgatggtctttggaaggtagatgtggaagggtcagtggttgggagtgtggaggtgcagaggccatgaagggggagcccaagcaaatccccaaactcacactgtagtcatgaccttgagagaacccgaacggaaacgcagtatctttttcttgagcgcgtgggaagctttgattttcacgaagactttggcggggcctgcgggcgcccctgcacctgctccacccccagaggccgcggtggccgccaccagctgctgcggccacacgaggccaccgctgccgtctgagtcgctggaggcagagctgaaggcaggcgattctccctcgctggcgctcgattcgctctccccgtaacccccgccgacgcctcccgcaggcccccggcgtcccaggggccccaggcgcccagccgagcactcggagtcgctgcccgcgcagccgtaaagcagacgacgctggggagctgacggggacgggccggggccgggaacacgcgccgcaggggctcggggccgcacgcggcgcccatcggcagcgtcgatctccgcagtggagcgccagcgacggcaggaccctgcggcctgggccgccagcgtgggcgctgggccgcggcgtggccgtggaggccgaggctcttcccgctccgccgtggggtacttagggggccccgaagggaccgcggaggcgcggcccagcaggctggtctcagactgggagcgcgaggccttgcgggccctgggcgagccgcggcggcccgaagcctcggccatgcgtccacggcggccggcggcccggggacgctcccggggtggtgactgctccacgctgcggccgcgggtcagtggcggcggtttgcggcgggcggcgcggccagggaggcctcgggtggccgcctgcgcgcccgggatgtactgcgccttcaccaagcggccctcagccgggctgtcggggggtgagggggcggcgggcggcgcagcgggctcgggtgccgcctccgactcccacgacgacgcccaggcgcggctcaaggcggcagggctggtggggtggcccccgacgcgctccaacgagggctcccgcgcgggtcgcgcgctgccgggggacggagacgcgtcgggcggccgctggcgcacgctgttctggcgccgcgggccgccgtccgcgcccccgggactggtccggggctggcccgccccccggcggcggcgcctgcgcaggagcgccgagatgtagccgtccaggggccgccctgcgccccccgcgtcgggcgagtcggtgggagggcggccgcagggccgcgggctgcgcatcgccacggcgtgcagggggctgggcgtcagaaagggcccggcgcgggcccgccgctccgccgaggagcaggcctccgggccggcggacccccctgccgtcgggtagggcgctgagaaggaccgcggcaccgctgcccgcgcgcccaccacctccggagcgctgggactggcgtctcctagggaaggaaggccaaaaaaaaaaaaaaaagagagagtggaggggctctcaaagtcctttcccatttctcatccagcccggaaggggcgggttgcctccctcccttccatcctcatcgcagcaaaaaccctgctctcacaccttccttcttgtaaaattcataataaaatctttacagggtcctacaagaccctgcgtgacttgtcctgcctctgcctctgcctctccaactctcacaacatcttaccccctattttttttttttttttttttttgagacggagtctcgttctgtcgcccaggctggagtgcagtagcccgatctcggctcactgcaagctccgcctcccgggttcatgccattctcctcctgagtggctgggactacaggcgcccgccaccacgcccggctaatttttttgtatttttagtagagacggggtttcaccgtgttcgccaggatggtctcgatctcctgacctcgtgatcctcccgcctcggcctcccaaagtgctgggattacaggtgtgagccactgcgcctggccttttttttttaagacaggttcttgcttgctctgtcacccaggctggagtgcagtggcgcaatcatagctcactgcagtttccagctcctgggctcaagggatcctctcgccttatcttcctgaacggctgggactacaggaacgcatcaccatgccctgctgatttttttattttttgtagggatggggtctcactgtgttgcccagtctagtctccagctcccaggctcaaataatcctcccgcctcagcctcctaaagtgctgggattacaggcatgaaccactgagctgacccttctcctctacttataggactccagccacactggcctcctgaaagcaggcgccagtcacattctggcctcagagcctttctgcttcccattccagattccagatgcccggaatgctcttccttctggatatctgctaggtccactcccccacttagttcagggcacaactcaaatgttacagtctcagtgaagccctccccagccatattttctaaaattgcacttccctccccaaactcaaagggacacttctgagtccctttccccggcttatttcttgtcatagcacatggcattatttcgtaccctagatattttacttatttatcctggtttatttatttatctatttatttatttatttatttatttatttattttttagacgaagtctcgctctgtcacccaggctggagtgcagtggcatgatctcagctcactgcaatctctgccacccaggttcaagcgattctcctgcctcagcctcctgagtagctgggattacaggcacgcgccaccacgcccagctaatttttgtattttttgtagagacggggtttcaccatgttggtcaggctggtctggaactccagacctcgtgatctgcccgtctcggcctcccaaagtgctgggattacaggcatgagccaccgcgcctggccatttatcctgtattttatctattcctccaactaggctggcagtttcctgagggcagggatttgcctgttttgttcattactgttcattttgttcattgctcctgggatactgctaggtagcacatagtgggggctcaaaaacttacttgtatgaatgaatgacagcagttcctgtttaccagtgactgccatgcaccaagtccaatgccttagagcagaggctcactgaatattcaaaaatatccccttagggcaggcactgtttgtgtgtgtgtgtgtgtgtgtgtgtgtgtgtgtgtgtgtgtgtgtgtggttggtgttttatttttatctttttgaggcagagtcttgctctgtcacccaggctggagcgcagtgacaccatctcagctcactgcaacctctgcctcccaggttcaagcaatcctcctggctcagcctcccaagtagctgggatacaggcatgcaccacaatgcctggctattgaggcactgttattataccattttatatttatttatttattttttgagatggagtctcactctgtcaccctggctagagtgcagtggctccatcttggctcactgcaacctccacctccagggctcaagcaattctcctgtttcagtcttcagagtagatgggactacaggcacacatcaccacgcctagctaagttttgtatttttagtagagacaggattttaccatattggtcaggttggtctcgaactcctgatctcaggtgatccacctgctttggcctcccaaagtgttgggattacaggcatgagccactgtgcccagcctatttatttatttattttgagacagagtcttgctctgtcacccagactggagggcagtggcacaatcttggctcactgcaacctccacctcccaggttcaagcgatcctcccacctcagcctcccgagtagctggaattacaggtgttcgctaccacgcccaactaatttttgtatagacggggtttcactatgttggccaggctggtctcaatctcctggcctcaagtgatccgcccacctcccaaagtgctgggattacaggcgtgagccaccgcacccagccatatttcattttaacagatggaaaaacagagacccagaaataagagacctgctcataaccatgtgaaaaggaaatgtcacagctggaattggaatccaggcccgattcggaagtctgtgcccacaaccatcctcctactgtcctttccctggccccagggccccaccctcacccaccttacctagggacttgggcctctcactggcatagatgccccggggctcagagggacccaggcgaccataggagctggatccagagaagccactgtccccacagaaggttgagggtggtgaatctggacctcctgtagagctgggatcttcatagaagcctaaatttccaggagaagcagagagacttcagggggtttgggtgggaaaaccagagctggggaaaggaggagatggcgtggggagagacacagggggcctcagaaatagggatacggggaacatggaggcgtcccaggcaaaccctacccctccatccatgctcacccgagctacgcccgctctcctgttccaggcccccagactccaggctcaggtctcccagctgctgtcccaggtcccagacgagaccaggcagggcctcctgaaggcatagggagagaaggatggtcagaaggcccccagtcctctgccgactggtcccctattccacgagctcatgggcagagtttcactttgacaatgaggctctcgcttcaaaggataaaagcagtacctcagtcccaggaccccctcaagatctgtgtcccttcatccccattagaaagtccttctgacgttccaactccagtccttcatgctgcagccccatctcattccctcttaggtgtgatgaggcctcagaaaacccccatctcttgccctgtctttatcagttgctacccccaatctgtgctcagagcccctcaaccctgattagaatgtccctctttgagtctaacttcaggattgctgtaaggacagtttactgctaaaaggtggtgtccaggacccccagatcccttagtcataggtctgccttcttctccaagtttttctttttttatttttatttatttatttatttatttatttattttgagatagggtctcactctgtcgcctaggctggagggcagtggcgtgatcccagctcactgcagcctctacctcccgggatcaggcaattcacccacctcagcctcctgagtagctgggattacaggcgcccgccaccacgcccagataatttttgtgttttcagtagaggcagggtttcaccatgttgcccaggctgatcttgaactcctgacctcaggtgatccacctgcctcagcctcccaaagtgccgggattacaggcatgagccactgcgcccagcctctccccgtctttgaccttctttctcagatacgcccattgccccttatcaccaagagaaggtccttttgtgagtcttccttaagtccttcctgctgcagattgcctctttcccccatatgggtaaaataggctgaccacgactcataaacgtctttgctctcccttcagaaagaacctcccaagcctcctagacagtcctgtgagtctagccttactggtactgcagcagccatcccagcacgttcctttgccctagagaccacatcctccttctgcctttggtccactcccaccaggaagctccagtgagtctacctttcctcatcgccatgagaaatttcggggagtcaggccgggcgcagtggctcacgcctgtaatcccagcattttgggaggccgaggcgggcggatcacatgaggtcaggagttggaaccagcctggccaatatggtgaaaccttgtctcccttaaaaatacaaaaactagcggggcgtggtggtttgcgcctgtagtcccagctactagagaggctgaggcgggaggattgcttgagcccaggaggcagaggttgcagtgagccgagatcacaccattgcactccagcctaagcaacacagcaagactgacaaaaaaaaaaaaaaaggaaaaaagaaaaagaaatttccatgagtctaccctggatccttcttgctgcaggaaaagagcacttctcacggatggggtctccaagacattaggacttaatctcattttagaaaagagagggtcagagccagaaaaagtctcacatgggtctgagtgaggccgggtagcagcaggcagcctcgggctgacggttgaccctcagacaaaagcggcttgtctggaccgcaggagggagggaagtggggaggagggtttgggagggcaggcacccaaccctgcctatttagggcagaaagactggccggctccccggcagccacaacccccccgccccatcccagtctctccagggcccagcctctcccatccccctagaacagaagcccccatccgggcctgtttatttgaggaaggtcaacaaatccttccactctgggctcctgccctgggtatattgagatgctcacagtgaagtcatctttgagcggaactcaaaaaagcagctgaattgtgcagcatcaggaagtaactaaaaaaaaatctctcggacctaccatgtaccccatgtcacgtccgtcacaaatcactggcatgctcactcccctctagccacgcctggccttgccaccgtccctcgaacataccatgtatgcgcctacctcgggagaatgtttcccccacataccttccttgcttcattcagatctttggtgatctcttctctgacacctttccaaaatagctcccctgtcattgtgtaccccgttgccctgcttttcgggttttttctacatatcagtaatgacctcttgatttaaaattatacatcaggccaggctcggtggctcacgcctgtaatcccagcaccttgggaggccaaggcagggaggatcacttgaggtcaggagttcaagatcagcctggccaacatggtgaaaccccgtctctactagaaatacaaaaaatagccaggtgtggtggtgtgtgcctgtaatcccagctacccaagaggctgaagcaggagaattgcttgaaccagggaggcggaggttgcagtgagccgagatcacgccactgcactccagcctgggcgacagtaagatttcatctccaaaaacaactaaaataaaataaaagtatacatcaaggtatcatttgtttgttgaatctctcactagaatgtcagccctaggaacgcggagatttgtctgtttagctcacaggtgcacccccacccagtgcctagaacagtgcctggcacaaagtgggtgctcaggaaatatttaatgggctgggtgtggtggcttatgcctatcatcccagcactctggaagtgccaaggcgggaggatcgctggaggccgagagttcaagaccagcctaggcgacatagtgagacccagtctctctctctctctctctctctctatatatatatatatatatatacacaaacacacatatatatatacacacatatatatacacatatatacactatatatacacacatgtatatacacatatatgtatatatatgaaatttatttatttatttatttatttatttatttatttttgagatggaatctagctctaccgctcaggctggagtgcagtggtgcagcctccacctcccaggttcaagtgattttttttttttgcctcagcctcccaagcaggtgggatgacaagcatgtcccaccacacttggctaatttttgtgtttttagtagagacagggtttcatcatgttggccaggttggtctcgaactcctgactacaagtcatccgcccacctcagcctcccaaagtgctgggattgcatgcgtgagccactgtgcctggtcttttttattttatttttgagacaaggtctcactgtctcaccaggctggactgcagtggcacgatcacggctcactgcagccttcacctcctgggctcaggtgatcctaccacctcagcctcccaagtagctgggactacaggcacatgccaccacacccccgctaatctttgtatttttttgtagagacagggtctccctgtgttgcataggcttgtctcgaactcctgggcttgagcagtcctcccgcctcggtctcttaaagtgctgggattgcaggcatgagccattgcacccagctgtctattttttaaaaagaaatattagatgaaagaatgaatgtatacaatggaatactatacagctgttaaaacggaatgagtcaaatttctatatagaatcattaccaagatatagcattgagcagaaacagaaaagggcagaatatatatagtatgagtgactcagaattacctggagggcttgtgaaagcccaaatgactgagtcccattcccagagcttttgattacagcctgcagtcacgcccaagtagttgtatggctaacaagttccatgtcatgtggtgctgctggctaggaggccacactttgactggcatagtctctgggacctcacccaagaaactagaatttgtaaaaagcaaagctttgacaaaagctctacgttttttggtatgtaaacagtttctgttaggagatatgttggaagaggtctgggaggtgacactaaggtgacaatgatggtgacctcaggggataggttggatttaggggatccagggaggaatgaggggactggatggtggaaggaagtgtttaaggaggcgtgacttggcatcacattaagctctgctgctccccagctgtgtgaccttgggtgggtgactttacctctctgggcttcagtttccttatctataactgggcatcataggacaccatctcctggaggttattgtgaggattaaatgagtttctttttttttttttttttttttttttgagacggagtcttgctctgtcgcccaggctggagtgcagtggcacaatctcggctcactgcaagctccgcctcccgggttcacgccattctcctgcctcagcctcccgagtagctgggactacaggtgcccgccaccacgcccagctaattttttgtatttttagtagagacggggttccaccacgttagccaagatggtctcaatctcctgaccttgtgatctgcctgcctcggcctcccaaagtgctggaattacaggcgtgagccaccgcgcccggccaatgagtttcttttgacacataataaatgccagtttgtatgattacaggaaagctatgaatttcttataaggaaaatagaaaatgtttccattgtttaattaaaaataaatgtaggtgtcgggcgcagtggctcacgcctgtaatcccaacaactttgggagaccgaggcgggaggatcacttgaggccaggaattcaagaccagcctggccaacatggtgaaagcccatctctactaaaaatacaaaaattagccaggggtgatggtgcatgcctgtaattccagctactcgggaggctgaggcaggagaattgcttgaatccaggaggtggaggttgcagtgagccgagaatcacttgaacctaggaggtggaggttgcagtgagcagagattgtgccattgcactctggcctgggtgacagagcaagattctgtctcaatgaataaataaataaaggccaggtacagtagctcacacctgcaatcctagtgctttgagaggctgagacagaaggattgcttgagcccaggagttggagaccagcctgaacaacatagcaagacctcatatctttaaaaaaaaaaaaaaaattagccaaatgtggcggtgtgcacctgtagtcctagcttcttgggaggctgaggcaggaggattgcttgaggccaagttagaggctgcagtgagctatgatcgtgccactgcacttcagcctgagagactttgtctccaaaaataaatgaataaataaatatatcatttaaaaatacataaataaacgtgaaaggatagactttttggtaagttctgccaagtctaattccggttcttccattacaaggaagagcagaaattagggagacagacaggagatgcctcctcctctccagcacctagacgccccccaaaaatattccaagtctacacccctctatttgcaagtctggcctcattccttccagttgcaaaaggatgaatctttaaaagattagaaagtccttggcctgagtctggctctctgcctcctcacggtgcccctcatccttcctctgcaggcttaataagagtgtggttaggacccctggagacccctttgcccaaacttcccttaccttgtttctcccctcacgtgcccctcgttggtatccagtgcccatttatctctattaggaagtcattctgcaagtctaacttaagttattcttgatgaaaggaacctttttccttcttgagagcaagcaggacccagggagcccctgccctcacccaggattcctgcctctcttctctgccacacccctgatctttacctggtatccccatcattcctattagaaagtaatcaagtctggcttcagtctttcttgccttgaaggaagtgtattcctggcaggggctgggggtggggggataagtcataagacaagggttgggggatcagaagaagccctaatccactcttcagagggacccaggaacccccagcactagagaagtttatatttagcgcttctctgctcctcctcctccccccgcctgccaccgcctcctccctgatgctgggacaagctttgcctagagactggggggtggggggacaggcctctccactatcagctcgtgccgggaggacagagggctgagggggaggaggggacagagggaccgaggagagggagactgaagggcagagatggggaaggtgaagggtgaaaaggggagagaccgagggcagagggggagaggacacagctacccacagctaccccaacctcatgcctcgcattctccttgtcaggatggaaggcgccttccaagccgagccagcttggggtggggggagctagcgaaggcccccacaatccgtctctaactttgggagggggtggggcctcccacagctgtttctgtttccagaaaagaatgtgcaggggggtcccactcctgagagggggaggggccgggcgtgcagccccgggagcctggcttcagtcttcctccccactccccatctggggagggggcggtcgaggtcagcggcggggagagccccctccactgccacctcggctcaggtttcccgaaacgggaagctctggccacacacaggcttggggatggggatctgccgtggagccagggtgtgcgggctggggggaggggaagacagactgagcctgggacgtcgggcaagaagaagagagcgaggtgcagacaggcaggaagggaaggccaaggagacagatgcagagggacacagagatcacagagacagagagacaggatgaagaaagagaagcagacacagaaagtcacagggatgtggcaggacggagagagtgacagaacccaggacgagatcgggagactcaaggaatgacatagaaaggggagaggcatggggcgtcctcaagtcattccggagacctctgcccatcttccaccatgagaacacccagagtccagaagtctcccccaggcgctgcctcgacctgcctccccttgggtcaaggagagctggggccaggtaggaagcaggggaagtgtcaccaaagggtcaagatcccagtggggggtcctcagggactgtgagcttcctctcagcagtggtccctccctctggaggccctgagattcccctcctcccaccccgccccctccagagatctccaagcacaccaggacttagggaagatggagccctggtggcggggcccagagaagggcatgtttggagcctggctgtgtcaccttgggtgagtcgcttgctctctctgagcctcaatttgtttctctgttaaatggggactatcaccccgtttcccaagccgcaagaagacaacgcctgcaaagtacccggtctcgggtttgacacatacttggcgcccacaaggattttctttggggaaggggtgtaagagacagggcctgtgtttctcacgaggccccagtgggggcgatgcagttccccctcccccgatttgggggcggggaggccaggtccggcccgccgccggaactccggggtcgccagccccaccccctgtcctttctcactccctgcctacccgggtccccaacccccgcccggtgtctgagcatccaaccgagacagacagacacagacgggggtggagggacggacggacaggcagccccttaccagctgctcctccagggccgctgcggcccggcgcgccgccgccgcatcttcatcctcatcggcgtcctcctcgtcctcggcctcggcgccccccattccgggctgggccagccgcagcgcctgctgcacgcggtactcctgcctctcccggagccaatgtaactcgcagagcccggccaggctaccctccagccagccccgcagccggccccgctcagggctcaccgggaacgagaaggcccggatcatggctgcggccccccgccccagcccggccgggccccgcggccacccctctcccggtcccacctccccgccccagcagcctgcccgcccgcccgctggccgggctgtcaccgtctcatctgcataggcgcccgcccattgggccgcccacccgcgccttatctgcatggccacgcccccggcgaccgagcaacagccgcctattggcgaataagcttcctgacgaagactctcgggcgtgcaaccgcaccgcccaacacgacgcatgctcgcaactgcctactcactccgctcgccacgccccctccgtgcaactgcctcggggccctggccacgcccccccacgcgtcacaatgaaacaagcccgcccttgcttcaatgccattggtctgtgcctggccggtcctgcagcaggttccaccctcttgcgggcgagcgctggctaccattggactgtccggcgcgaggggaagggtgatctataaatagggaatgggtacacgtgacagtttggcagctgctcctacccctccaccccgcccaaccttcagcttctgaggctgcgcagggggagaaaagggttagggggtcgagccctgacttcgcctcctcttccaagaagccttcccagacactcagctgtaaaaccagacggacgtcctccgatgaaattgtttctacttagggccggcttcaccggcttggaatccacttagaagggtcttcgcgcttggttgaatgttctgcaatttctgtcttgaaatttttagtttttgagcaaggggccccttattttcactttgcactaggccaaatatgtagccggtcttgctgctaagagtctaagatcgattgcattccaaattctggaattataagaccctgggtggaagattctatgctttgaccagaagagagtctaagcagcttttgtctcccaggtgctaggaggatgtgtgctcatcattcttccattccaggggcctttgttctacgttctaaggggctttgttctcagccttctatgatgctctattctcaacgttctctggtcctaggagtctgagcctgacattcgtttccaaggcttcctgctgtctctccaggctccgcaagcagggctggggcaccctcaggcggccaatctgtatcactacgccgagcctgcctctaccaacttccaagacctagctctaatattcatactcatctctcagacagaccttggctccctaaaagccaaggcccagaagatcatacaagaaattccctcttttatgattccccgtgcacgaagtgaccttctggtggtgagatggagagaaattgatagtggcgatagacagcaaagtctccaggagccagacttcctcggggtgagtcacagatctgtcactttccagctgtgtgaccttggaaaacttacttaacctctctgtgccaccgtttcttcatctgatcacgggatcataatactggctgcctcatacagttgttctgaggattcaatgaaatgtattaggtacttggagcagtgtcttccatggattaagagccacagaagggtttgacaaataagtttaaaaactaatctagtaagtttccggggggaaatgtcttgaaatttattagagacaacctttattcagtcttcctcttgttcaaaatagacttagaaaattagtcgggtgtggtggtgcacacctgtagccccagctacttgggaggctgaggcgggaggatcacttgatttcctttttgacttcttgatgcttttattaatgatgatgccaaaagatttctggagaatcagccaggcgcagtggctcacgtctgtaatcccagtactttgggaggctgaggcgggcagatcacctgagttcaggagttcagatcagcctggccaacatggcgaaaccccatctgtactaaaaatacaaaaattagctgggcatgatggcacacaccgagactgtggcactgcactccagcctgggtaacagagggagactccgtctcaaaaaaagaaagaaagaaagaaattgagagagagagagagagaaagaaagaaagaaaaagaaagagagagagaaagaaagatagatgtctggagaatcaacaagcaacagttgcttccaaacatggcacacaaactggatatggtggcatgtacctgtagtgcgagctactcaggaggctgaggcaggaggatcacttgagcctgggaggctgaggctacagtgagccatgattgcaccattgcactccagcctgggtgacagagcaagacccaatctttaaaaaaaaaaaaaaaaattgtgattacagagactgagtcccatgcaggggctgttaatgaagttgcagaagctcatagaccttgatttatagatggtagggatgggaagaggttcccataaaaatcgagtggtgcgttgggagaggcctttgaggaaggcgtgtagggcacagtgctccatccaaaggctttggtggtgcgagtgaaggggatggggccctgggagtagtgatttgtgctgagaaaggggaacaaaactgacaatcctaattgcagttgtaagactgagtaaacacttttgcaaaagtaagccaggggcattgtggatcttgcaggctggaaggtagaatagggaggggagatgtgtcatttgggaagagacagaagttacagctggagaattgtgatctgagaagcatgtaatcaaagatcagtcaaagagaatgcaaatgaggccgggtggggtggctcatgcctgtaatcccagcactttgggacgcagaggcaggcagatcatttgaggtcaggagttcaagaccagcctggccaacatggcgaaaccccgtctctactaaaaatataaaaattagctgggtgtggtggtgcacgcctgtaatcccagctacttgggaggctgaggcaggagaatcgtttgaacctgggaggtggaggttgcactgagccgagatcacgccactgcactccaacctgggcaacagagggaggctctgtctctaaataaataaataaataaagagagagagaatgcaaatgaaaggcaaaagtcatatgatgagaagcaggcacgggaggaccagagtgggtattaaaatggggaatcctagccaggctctgtgacatgcacctgtagtaccagctacccagaagacagaagcaggaggattgtgtgagctcaggagttcaaggccaacctgggcaacatggtgagaccctgtctctaaaatagcgtgtgtgggagggaatcctggagtttctgattccaggagcaggctgtctcatgatgttgtctgcttaacccaaggttcttgggagagctgtctacaattgcagcctcgtctgcttccagggctcttgaaagagcctccctctgaggtctccaacgggagtggattcccattcagcacaggtcttatatctcttcatctctgagatatgaacccaaggcaggacagtctggtgtttgcaatagtgtagggtccatcccatctgagttcaaggttagtcttcctgcgatgtcttttccggaggactaaattccctgtttggaaattatgaagaggccgtgatggagtatttggagggaaggcagctcacacttgttagtgacaagcataagtgtacttagtccttgataatatctgagaatgtcgattgtaatagattagagtcctcaagggcccaataggagtagaatccttgtgagtctttgagtgattatttcataagaagattattgatatgtgctctggtaggaagagtaatggcccccccctaagatgtctacatctttatccctggaacctgtgaatatagcaccttttatggaaaaaggaactttttgtgattaagaatcttgagatagggagatttatcttggattatcctggtggacccagtatcatcacaagtttccttataagatggaggcaagaacgttagagtcagagaaatatgtaaatatagaagcagaggccgggccaggcacagtggctcacacctgtaatcccaaagctttgggaggccgagtgggggaggatcgcttgaggccaggactttgagaccagcctgggcaacacgtttctacaaaaaaaaaaaaaaaaaatcaaaaaattagccaggcatgatggcgcacatctgtggtcccagttatctaggaggaggatcgcttgaggccaccagtctgatgctgcagtgagctgtgattgtgccagtgcattccagcctggggcgacagggaaagaccctgtctcaaaaaataaaataaaataaatctgtgttgttttaagccaccacattcatggtgatttattctagcagtgtattcatttgctaaggtggccataacgaaacactacagacatagtttaaacgacagaaatttattttctcaccattctagaggccaagaagtccaagatcaaggcgtcggcagggctggtttcctccgaggcctctctccttggcttgcagatggtcaccttctcactgtgtccacacatggtttccagtatgtgtgcacacatccctgtgcctctctccttgtcttttttttttttttttttcaagacagaatcttgctctgtcacccagattggagtgcagtggcacgatctcggctcactgcaacctccgcctctcaggttacagtgattctcctgcctcagcctcccgagtagctgggattacaggcatgagccaactcacccagctaatttttgtatttttagtagagacgggatctcaccatgttggtcacgctggtctcaaacttctgacctcaagtgatctgcctgccttggcctcccaaagtgctggaattataggtgtgagccaccgcacccggcccaaaaaactttttaattagctgggcgtggtggtgcatgcctgaagtcctggctactggggaggctggggaggaagaatcacttgagcccaggaggttgaggctgcagtgagccatgattgcaccactgtgctccagcctgggcgacagagcaagactctgtctcaaaaaaaaaaaaaaaaaaaaaaaaaaggaaagaaaaagaaaagaaaaaggaaaataagctaatgcttgtggttatggggaagtcaagggacaacagtgggcaagggtaagttcaattcttcagttagtttggcaagtttaagtttgacgagactgaatcggcatgttcaatttgtcctgatgatcataggcaatagggctaaaggatttctgtgaaatgggagtacccactggttctctggattagcctgcttgatatggtatgggtaggctttgtgacccacccaaatctcattttgaactgcagtcctcaggtgtttaaggaaagacctggtgggaaatgattggctcatgggggctgttcttgtgacagtgagggagttctcacgagatctgatggttttataaatggtagtttttcctgcatttacacacacgcactgtcttgcctactgccatgcgagatgggcctcttcaccttccgccatgactgtaagtttccttaggcctccccagccatgtggaactgtcagtcaattaaacctctttcctttataaattacccagtctcggccaggcgcggtggctcaaacctgtaatcccagcactttgggaggccaaggtgggcagattacttgaggtcaggagttcaagaccagcctggccaacatggtgaaaccccatctctactaaaatccaaaaaatcagccgggcatggtggcacgcacctgtaatcccagctactcaggaggctgaagcaggagaatcgcttgaatccaggaggcggaggttgcagtgaactgagattgcaccactgcactccagcctgggtgagagaaaaagaccctgtctcaattattaactgtggtcactgtgcagtgcaatgggccgctaaaatgtattcctccagtctagctgaaactttgtacctttgatcaacatctttcctgggtcaggcacagtggctcatgcctgtaatcccagcactttgggaagccgaggtgggaggatcgtttgagcccgagagttcaagaccagcctaggcaacacagtgaaaccttgtctctacaaaaaaaaattaaaatcttccttttcctcatcccccctctggcgctgagtgtgctgtttgggctgacttgggttcagggaggcatggaaacactatgagcttgttgaaagtcagaagagagcctactgcttagaaatttcctgccgggtgtttaaggtgaagggccatccacaaagagggtgacacgagattgtcacatggaggctcttcaaggtcaggacaagaaagaataagaatctggggcccgggggcctgacgcagtggctcacgcctgtaatcccagcactttgggagacccaggtgggtggatcacaaggtcaggagatcgagaccatcctggctaacacggtgaaaccctgcctctactaaaaatacaaaaaattagccaggcatggtggtgggtgcctgtagtcccagctactcaggatgctgaggcaggagaatagcatgaacctaggaggcagaggttgcagtgagctgagatcacaccactgcactccagcctaggcaacagagcaagactccatctcaaaaaaaaaaaaaaaagaatctgggtccgggcctggtggctcatgcctgtaaatcccagcactttgggaggccaaggcacaaggatcgcttgaggccaggagttgggaaccagcctgggccacatagtgagaccctatctccaaaaaatttaaaaacttagccaggtatagtggtgcatgcctgtagttccagctagtagggaggctgaagcgagaggattgtttgagcctgggagtttgaggctgcagtgagctatgatcgtgctactacactccagcctgagtgagagagcaagatcctgtctcaaaaaaaaaaaaaaaaaaaaaaaaagcatgttagggagctccaattccccaggcaatccttccttgcctcttcccagcttctggtggctcttggcaatctctaacattatttggcttgtggctgcatcattccaagctctgccttcatcctcacatgcttctccctgtgtcttacgcggccaccttctcataaagacaccactcggccaggcgcggtggctcacacctgtaatcccagcactttaggaggccgaggcgagcggatcacctgaggtcgggagtttgagaccagcctgaccaacatggagaaaaccccgtctctactaaaaatacaaaattagccgggcatggtggtgcatgcctgtaacccagccactcgggaggctgaggcaggagaatcgcttgaacccgggaggcagggtttgcggtgagccaagatcgcgccattgcgctccagcctgggcaacaagagcgaaactccatctcaaaaaacaacaaaaaaagacaccagtcatgttgcattaggggcccaccctactccagtatgacctccttttaactgattacatctgcaatgaacttatttccaagtagggtcatatcctgaggtactagggagacaaaattcaaccaatgaccagcccagaaaccactggagttgccttttagtcttggataaaacaaaaataataatggtataaatgcatgctgtgtggataaggttttgccttcaagggcaaggtcatgccctaaatcttgtacttatgaattacatagttataatttatcctagacacccttttttttttctgagacagggtcttgctcttttgcccaggtggagtgctgtgatgcaatctcggctcactgcggcctcaacctgtcaggctcaagcaatcctcccacctcagcctcctgagtagctgggactagaagcatgcatcaccacactcagctaatttttttattttttatttttgtagagatgggggtctccctatgttacccaggctaatctcgaactcctgggctcaagtgatcctcccaccttggcctcccaaagtgctgggattacagacatgagcctgtcctttatgagcaagggcttggggccgatttttatttgtttttcctacttcctgtataattgcagaaacttggggcacgtgtggagtgtgagtgagtgagctgctggaatgaactgaccagacaggacatcatctatgtatgggattagaatggaattacaggagaaaaccaaatccctcaaattagcattcaggatcggaaaaaaaagtaagtaggggtttcaacgaaccactgaggcatagcagtgtatgtatgtttactgttgactttcaaggggaaagggaaatggggctgtggatcatcaggtgtgtgaaagaaggcagagggcatgtgagtacagtcgagtgggtggtgttggccggtctagaatagaggccagtataatgtttggattggaaatagcaggaaccacagtgtgactattttgtttacagccttgaggtcttggacttgctggtatcctttatcgagactgttattgggattttgttttttttttttttgagacagagtctcactctgtcacccaggctggagtgcaatggcgcgatctcggctcactgcaacttctgcctctcgggttcaagcaattcttctaccttagcctcctgagtagctgggattacaggtacctgccgccatgcccggctaattttttaatttgtttttagtagagacggggtttcaccatgttggccaggccggtctacaactcctgatctcaggtgatctacccgcctcggcctcccaaattacaggtgttatcattaggattcttggcagacaggagtgttgtaggggatggaagtggatagtaggaggctctgaataatgggttgggggccctagtgtgcctctggtgtcagagcacattaaggcagcttcaagaagggcatgaaaagatctaattctattccacaacttggggtaattggttaaaaaaaaaaaaagggagccaggtgcagtggctcacacctgtaatctcaacactttgggagaccgaggtgggaggactgcttgaggccaggactttgagaccagcctgggcgacatagcaagaccttgtctctatttaaacaaaattttttttaattctaaaaagaaaggatctacttctaccttaagaggttcagcctcccagaggcaccctacatttgttgagttgggggctcaaagagaatcaggaatgcaagtcacagatcttggatatgtaggtctgagggagaggtggatgttttgggaagggggtggttggagtggtgggaaagttagtggactgagatgaacaagggcagaattagggactgggagacataagccctcttgtgaatatgaaatattatggctttggctgggcacggtggctcacacctgtaatcccaacactttgggaggccaaggcaggtggatcacttgaggtcaggagtttgagaccagcctgtccaacatggtgaaaccctgcctctactaaaaatacaaaaattagccggttgtgatggtgtgcacctgtgatcccagttgcttgggaggatgaagcaggagaatcgcttgaacctgggaggtagaagttgcagtgaggtgagatcgcatcactgcactccagcctgggtgacagagcgagactccatctcaaaaacaaacaaacaaaaaagaaatattattgttctacgttgatagaacatccctttctaaagggattattggagtaatttgaataagaaactgtgctgggtagtagagagcccaatgagcccaagagtggcttagacaggcataaaccatgtggctaattgtggtctcatcaccattattgctgtgtactgaggtagggaggggggactgagatatttatggcaaagcatgtggcccctgtgtctacaaaaaccctggcaggatgctcattaaggggattgatggtcatttccccctgaaggttaaggaatccttatagacacagaggagaaagttggctggaagtgagtcactgggagactgaatcttagactcaaattccttttgcatttcaaagctaaatagtgtcaagtccaatgtcccttttctttacagtatatacaagtgtctctatcaacattaggttttgaggttgagtgcagtggcccacacctgtaatcccagcacttttgagaggtggaggatcgttcaaccccaggagttcaagaccagcctcggcaacatagtgagaccccatctctataacaaataaaaaacatgcccgggcacggtggttcatgcctgtaatcccagcactttgggaggccgaggtgggcagatcacttgaggtcaggagttcgagaccagcctggccaacatggcaaaaccccttctctactaaaaatacaaaaattagctgggcgtggtggcatgtgcctgtagtcttagctacttgggaggctgaggtgggaagatcacttgagcccaggaggttgaggctgcagtgagctgtgatcatgccactgcactttggcctgggcaacagagcaagattccatctcaaaaaataataaaataataaaaaaattaaaaactacataaaaaacaaaaaattagcgaggtgtggtggctcatgcctgtagtcccagctactcaagaggctgagggggaggatggcttgaaccctgtagtttgaggctgcagtgagctacgatcataccactgcacagaagcctgggtgatagagcaagaccctgtctctaacaaacaaaattaggttttgtgattccagtggtcctgataggataaactttttgtctctaatgatttaagttatagggccctaagttttcattgtatggatttgatttttttttttttttttgagacagagtttcgctcttgttgcccaggctggagtgcagtggcacgatctcagctcaccgcaacctccgcctcccagattcaagcgattctcctgcctcaacctcccgagtagctgggattacaggcatgtgccaccatgcccggctaattttgtatttttagtagagacggggtttctccatgttgatcaggctggtctcaaactcctgacctcagatgatccacccacctcagcactcaaagtgctgagattacaggcgtgagccactgcgcccggccttgattttatctttcatggcatcctcatgatatacactatctcctggaattctataattgaggaatgtttttgaatcacgtctctcatttctggtctctggatattaactagtggccaagacagaagcagatcaggggtgatagtcttttccatacattttctagcctgggtctgtcacgggagatggattcatctctatgttgcctacacttctggaccttagactaaacagagggataggcactggggatggagtctaagagcctttccccaatagtcttagcaactatgcctcagaggtatactgctcctttggataccttcatttactgaggctcgtttagcattttcaaatcaaagagctgcattttggccaggcgcagtggctcatgcatgtaatcccagcactttgggaggcctaggcaggcagatcgcttgagcccaggagtttgagaccagcctgggcaacatggtaaaacctctgcaaaaaatccaaaaaattagctgggcatggtggcatgtgcctgtagttctagctactcaggaggctgaggtgggaggatcacttgagcccagaaggtcaaggctgcagtgagctgtgttcatgccactgcactccagcctgggaaacagagaccctgcctcaggaaaaaaaaaaaaagctgcagctctggaaccatcagatggacaaggtgatacaaatcaaattggaaaatcccagagtaagctcccagtattagcctaaattggctactaaattctttcctgttttcctgggttttttaaggctgtgttgcccaaactggactcgaactcctggactccagcgatcctcccacctcagccgcttaagtagctgggaatacagtcacccgccaccatgcccagctttcagataggtctttgcagcacgtaagtcagagcgttctgaaagtctgaagaaaacttgttcaggtccatgctcggatcgttcaccttcagctgtggaaggtggaggaccatgtgttagggtgttactggagaactggggaggtggagggctggagtcaaaggtagagagaggtggatacgtgttccctccagttcattccctctgccttcagtctttcaaggccaagatgaagcctaagaggtcacctctgattccccactctctctgacccctgagctcattctaggctgcccaagcctcccaaactcccccagtccagcccttcccgttctgggtcatcactgtccaggggcaggtatgtctctctactggcagggcagtccttggctgtctcagtcaccactgtgtccccagcatcacccagctcagtgacacaaaggaatgagtgaatatatacttctctatttcatagatagagaagtcatcacatcaacataaaataaaatactgaatgttacgtatcagttttctagtatggatcagacttgggctaactgcattttattatttgacttttgagacagggtctcactctcttgcccaggctagagtgcagtggtgtgtgatcttggctcactgcaatctctgcttcctgggctcaagcgatcctctagcctcaacctccaagtagctgggaccacaggtgcaagccaccacacttggctaatttttgaactttttgtagaaagggagtttcaccacgttggccaggctgctctcaaactcctgagatctaagggatctgcctgcctcggcctcccaaattgctgggattataggcatgagccaccacacccagcctgaattaatagttgtgattagtagtaacaccaccaccaaataaaaaatcagtcatcacaaaccatgagattactttttctccaagttctctaccctccagtcacattccttccatctctccccagtttccaactcctcctccattactcctccctctcccttctcatcttctctcctggcactcttcctgtatattttctaccccagctcgtcctccttccaagactcctctcccatcagtcctctctccccaccccttccatccttcctcttttcaggcagtcctccttccagatgaactccatgttggtacaacagagtaatgattcgagagtgccgtgtgctgagatcaaggccatggggccagagatgagtccgttttaattgctggggaaacagggaggggccttggaaatagctccccccaccccactccccacgtgtcccatccagtttgggcaggaagccactttccctagaacagttcattgctgggatcctgtgaagaaccgctgtggagggcagcagctggacgagggcacaggacctcagagaacactgatgcgctccgccagcccctgcatgtcgtggtcctgtggtggacaggccccaccgagatccctgtccgtgggcagcccagacccaggcagcggatgctctgctgcaaactgctcccagcgcgcgtcgtcactctcatgcgtgatgtatcgctctcccatcttcccctccagctctcggaggtccagccacgtctggtactcctgggcccgagagaactggggttagcttggggtctgcattggagcagtgcctggatatcctctggtttgccactgagagctgggtaccaatgaaggtgaagccataccctctgcaacccacccagccagtagacatttagctccaccccctcttcctgcacccagccaatgggaggcctagccacattccagacccaaggaaacctacatccttcacaacctgcctagccaataagcgatctactcccaccccttcctccaatccagccaatgggccagccctgccccctgcatcacctgtaaccaggggtggctgagagatttgtccacgctgtagcgtttgcgcatcttcacctgcagcaggttgttgatgaggtcaatggctgcacaggaaagagaaacaggtcaagccctacaggtcaagggtcactcctcctccaataggcaccccctagcctacctgcctgccatcaacaccttccttctgcaccagctcaggtggctcagaagcctcacctgtgccaatcactcacccacccatttcctcattacattacaaatttgtctcctcctgcccatgcatgttcacaccagctccctctcttcacctgttctctacttcaatttccccattcccctatgtcacctttttttttctttttgtcatatacaggtacatacaattacacctgtactattctttttatttttacttatttatttattgagacagagtctcgctctgtcgcccaggctggagtgcaatggcacgatcttggctcactgcaacctccgcctcccgggttcatgtgattctcctgcctcagcctcccaagtagctaggaatacaggtgtgtgtcaccatgtcctgctaactttttgtatttttagtagagatggggtttcaccatattggccaggctggtctctaactcctgacctcaagcaatccgcctgccttggcctcccaaattgttgggattacaggcatgagccactgcgcccggcctaaatggattttcaacctacaatacttccttttttttttttgagacagggtctcattgttacccaagctgaagtgcagtggcgtgatcaatgctcactgaagcctccacctccccagcttaattgattctcctgccttagcctcctgagcagccagctgggactacaagcacctgtcactatggccggctaatttttgtattttttgtagagatacattgcccaggctggtcttgaactcctgggctcaagcaatctgcctaccttggcctcccaaggtgctgggattatgggcttcagccactgcgcctgaccaacttatgatattttcaatttacaatgggcaatgggtttatcaggtttatctaaccccagtgcaaatcagggagcatctatgtcatcaggctgggcgcggtggctcatgcctgtaatcccaacactttgggaggccgaggcgggtggatcacccgaggtcaggagttcgagacaagcctggccaacacggaaaccccgtctctactaaaaatacaaaaaattagctgggcatggtagcgcatgcctgtagtcccagctactcaggaggctgaggcagaatcgcttgaactcaggaggcagaggttgcagtgagccaagatcgtgccactgcactccagcccgggtgacaaaagcgaaactccgtctcaaaacaaaacaaaacaaaacaaaatgtcatcagatggtagttagtcaccattgcctgcagaaggctcagagataggcctgttcattgtgaaaaagaggactagcgaatgtcaagcttcaagacaagccagcactcatccgaggctctctccttgatgggaagccatgaaggacaaggcttcactgtatgaacccatccgaggagaggcctggtgcacacaggcaccctgctcccgtcaacacccacaggattctgtgatcctcacacaggtgcaaccacacttaaattcacttgtgcacactcgatgcacttttactgagggacttctgagtgggtctcaaaagacaatgctggcggggtgtgatggcttatgcctgcaatcccagcactttgggaggctgaagcgggcaaataacttgaggtcaggagttcaagaccagcctggctaacatggcgaaaccctgtctctactaaaaatataaaacatgagccaggcatggtgctgtgtgcctgtaatcccagttactcgggaggctgaggcaggagaatcccttgaacccaagaggtggaggttgcagtgagccgagatcacgccactgcactccagcgtgggtgaaagagcgagaccccacctcaaaaaaaaaaaaaaagccagtgttgagcacccccaatattactccaggactcaagtcaatccacattctcactgcttagggcccatgctcttagaccaccaccaagaccttgtcttgtcctgcaccgagcaacctccgtgtcaccctgctccacctgctccatgaagccgcaccctccagagaggacccttcccctttccacccttcgcggaccactcaatgagctaccctgcacctgaccccttctgtccaagtcatcacagtattcccagagctggaacagtcaatgcctggcacatcgtgggcactcaacatgttgaatcaatggttacaaatacatgaatgtacttgttgaataaatggttataaataaatgaatgaatgatccccccccttcccatactccatctgtcttcctgagctccctggctccaacacaggtcccttgttctcctggcttctgacacaccccagtatcttagccctgcctctggccctctaaacatgccatcccacacccagcctcaaagctccaggccttaggacttaacttttccaagcagggaaagttacagacccattcccaagtaggttcaagtcaccaggcccggtgccacttcatcaggcccagccacaacaccaaagccccagaatgcagagtgcaatgtctgcctcagtcctggctcccttctcctccccactcccatccactcccagcttccaggactcagggtcagccctgttcctggacctcttcggaaaccctccacggccacgtccctagactggctcccttggtcactgaaccgaccccaggcttcaggcccatcttcacccaagtcacggccccagtacacagcaaagtagccatgcccttgtttctcaaccctacccaccggtgcctcctttttgcaaggctgacccttttggggtcgtaaacccaaaggctccaggtcccagccaatgccttgggaggctcagccccttctcctggtcaccgcagccctttggtaccctcaagtccagtccctttcctggtcccaccctagacaagccaagtctcactcagcccccctaaggttccaagtgtcctcagcgcttctggggcacttggtttccagcccaagtaacctagtctaggcctgagtcccagcccatcttttacaggacggctcctcctgtagccacatccctccagtaggcccgccccagcactgggctccacccccaaggtgccaggctgtttccgggtccacccccctctcatggctccgcccacttctccagccccaccccacaacccacccgcccatggggtaggcgggccccaggcacctccagctgagatgtggctccaggggctggccgggtacatgaaggcggcgttctggatctggtcattgatgtcctcatcctcgttgaaagggaaggtgccgctgaggctgacgtacatgatcacgcccactgaccacatgtccagcgagcggttgtagccctggttgagcagcacctcgggtgccaggtaggccggcgtgcccaccactgagcggcggaacgacttctcgccgatgatgcgagcaaagccaaagtcacacagcttcacctgcagagggcaagggatggaggctccaccaggtgatggagccgcacccaccccagcatccccaccacaccaccctccatggtattccagagaaagctggatgctggtttgaatccaggctccttggctcactagctgagcaaccctgggcaggtgacttcccccctctgtgcctcagtttccccatctataggaagaagagcagaagagcacctatctcagaggactgccatgatggttagtgaattaaaccatccaaagcccacaggacaatatttggcattcagttggtgcacaataaatgctagctgctgctatacctctgccacctccaatgggtcgctgtttcctcttttgaataatgcagattttttttaatagcctcaaaatatacatgattggggcgtggtggctcatgcctgcaatctcagcactttgggaggccaaggaagatggatcatttgaggtcaggagttcgagaccagcctggccaacacgatgaaaccccatctctactaaaaatacaaaaattagcacacgcctgcggtcccagctactcaggaggctgaggcaggagaatcgcctgaacctgggaggcagaggttgcagtgagccgagatcgcaccactgcattccagcctgggtgacacagcgagactccgtctcaaaaaacaaacaaaaaaaacatgaaacataatggagatcttaacagtccctaccttaaagggtgcttgtttagactgaaagagaaatgtatgcaacgtgttaggagcagtgtctagcacagaatgaccctcgatgatctcaggtcaaggacctaatttctccaggccttgattttgtcatctgtattggggggttgttgatagcagcctcctctcaggctttcctggggattaggtaggagtgggtgctgactgcggtagctggcagacagtatggtgtatgcctacctttccttcattgttttattttttttgagacggagtctcgctctgtcgcccaggctggagtgcagtagcgtgatcttggctcactgcaacctctgcctcccaggttcaagcaattctcctgcctcagcctcccgaatagctgggatcacagggacccgccaccatgcctggctaatttttgtatttttagtagagacgacatttcaccacatcagccaggctggtcccaaactcctgacctcaggtgttcctcctgcctcagcctcccaaagtgctgggattacaggcatgagacaccacacctggccccataccctcattgttaatggctgcagtctaaggtcatggacaggctttggagccagcaagacctgggttcaaggtcttgctctgctgcctacctctcagccttggttcccagctctgttcatgtactgtcctttccctgttcaaaacccttccttggctcactgttgcttgcaggatagagccccaaatccttgaagcctgaagcctctgtcacctttgaaaccagccacgcctcaacccctgacctgaatctcaatgtgacagccaccctttcctgaggtactctgccctttctacagatcttatagctctttctcttttccaagatctatactttcctatggatcttttttaaaatttttattttattattatttttttgagacgagtcttggtctgtcgtccaggctggagtgcagtggtgtgatctcggctcaccgcaacctccaccctcctgggttcaagcaattctcctgcttcagcctcctgagaacctgggattacaggttcccgccaccatgcccagctaatttttgtatttttagtagagacggggtttcgccatgttagccagactggtatccaactccagacctcaagtgatctgcccgcctcagcctcccaaagtgctgggattataggcatgagccgctgcgctcaaccagaaaacttttaaatatgtttggaacaacttgggcatgtcaatctatttccccaactgttatacacaccagattttgaagacatagtatgaaaaacaagcagaatgtttcattgagttttgtttcttttttaagagacagggtcttgctctgtcaccccagctggagtgcagtggcacaatcatagctcacttcagacttgaactcctggtctcaagccgtcttcccatcttggcctcccaaagtgcggggattataggcatgagccacctcccctggccttaataatttttatgttgactacatgttgaataaagtgctatatgttgggataaactatatatatatatatatatatatttttttttttttttttgagacagagtctcgctctctcgctctgtcacccaggctggagtgcagtggcgtgatctcggctaactgcaagctccgcctcccgggttcatgccattctcctaactcagcctcccaagtagctgggactacaggcgcacaccaccacgccccgctaatttttttttgtatttttagtagagaaggggtttcaccgtgttagccaggatggtctcgatctcctgacctcgtgaactgcccgcctcggcctcccaaagtgctgggattacaggcgtgagccaccgcacccagtcttttttttttttttttaagagacagctctcactctgttattcaggctggagtgcagtggcacaatcatagctcactgcagccaccaactcctgggctcaagcaatcctcccatctcagcctcctaagcagctaggactataggcgcacgccaccattcccggctattttttttttcattttttgtatagatgaggtctcgctatgttgcccaggctggtctcaaactcttgggctcaaatgatcctcctgcctcagcctctcaaaatgctgattacaggcaagagccactgtgcctcgcccccacatcttgattagtataatccccttccccacccccaccccggccatcagtgttgcctggatttccccaaatcaggaggggacataactgacctgaggaaatgggtctgctgatgccagcaacacgttttctggtttcaagtcacagtggacaatgttcttgaagtgaaggtgtctcaaagccaccaggatctgaggggagcagatgggcccagtaagaaaggtagataggtactcagccaaatcccaacctcagcagccagccctccaaacccatccatacttttttttttttttttttgagacagagtctcgctctgtagcccaggctggaagtgcagtggcatgatctcagctcactgcaacccctacctcctgggttcaagtgattctcctgcctcagcctcccaagtagctgggactacaggcgtgcaccaccatgcccagctaatttttttttttctttttgaggcggagtctcactctgtcgcctgggctggagtgcagtggcacgatctcggctcactgcaacctctacctccagggctcaagtgagtctcctgcctcagcctcccgagtagctgggattacaggcgctggccactatgcccagctaattttttctatttttagtagagatggggtttcaccatgttggccaggctggtctcaaactcctgacctcgtgatttccccacctcggcctcccaaagtgctgggattacaggcgtgagccaccgggcccagacttgctctgataattttttcttttatttttagtagagacagggtttcaccatgttgaccaggctggtctcaaactcctggactcaagtgatccacccaccttggcctcccaaaatgctgggattacaggcgtgagtgagccactgcgcctggccccatccatgccttcctacacacccctgcagacaccccagccagggaaacaggaggcactggagcaccaaagaatctcagaatcatagaaccatttacatctgagagataagagttaaatgtaaactagaaagtctgggctagatgagtggggctgtgaagatcccaagatcttctagcatgtggtaaactcctgaatgctactgacagagcaggcatttccaagatccaactatgtgattctattttttttttttttttttttttgagacagagtcttgctctgtcactcaggccagagcacagaggcgggatcacagctcactgcacctcgacctcccaggctaaatccatcctcccacctcaacctccctagtaactgggattataggcacacaccatcacacctgactaatttttgtatttgtagagacagtgtctcaccatgttgcccaggctggtctcaaactcctgcactcaagtgatccacccacctcagcctcccaaagtgcttggataacaggcgtgagccaccccacctcacccattttttttttgaagagatggagtctccctctgtcacccaggctgaagtgcagtatcattctacagcctcaaactcctggggttaagtgatcctccagcctcagtctcccaaatagctaggactacaggcatgtgccaccaccaccatgtcgggctttgattccttttttttttttttttttgagaaggcctcctgattctcctgcctcagcctcctgagcagctgggattacaggcacacaccaccatgcccggctaatttttgtatttttagtagagacggggtttcatcatgttggtcaggctggtcttgaactcctgacctcgtgatccaccaaccttggcctcccaaagtgctgggattataggcgtgagccactgtgcccagcctgatttcatttttaaaaaaaatatttttcatccttacaaaaaactttggctgggcatggtgactcatgcctgtaatctcagcactttggaaggctgaggcaggtggatcacctgaggtcaggagttagacaccatcctggccaacatagcaaaaccctgcctctattaaaaatacaaaaattaggcgtggtggtgggcgcctgtagtcccagctactcgggaggctgaggcaggaaaatcgcttgaactggagaggtggaggttgcagtgagtcgacatcgcgccattgcactccagcctgggcgacagagtgagatgccatctcagaaaaaaaaagagtaccaaccttacaggttgctataaggtttaaagcatatctaaagatgcatgtaaaacgcttaggatagctaaccactgtatgttagctgttactgttgttgttattagttattatttttgtgatggcttgttggtaaatatatttgtttgtgtctcttaaataaagcttctcctgctgtatctgttcctatgataaggtgagctgattaaaaaaaaaattaccatttgtaaccattcatctgtgagaatcatatttcttgattctctgtaactcaaaatgccaagtacaccagaagcaattgtacaactgcaattattatctgtctcggagtttaaatacttgtgtatctgtctcagagtttaaatacttgtgtttattctgattgttttcttttttaaaaaaatctttttgtagagatggcatctcgctatgttgcccaggctggtcttaaactcctggcctcaaatgatcttcccacctcagctacccaaaccttgagataataggcacgacccaccatgcctgaccaacctcctcattctacagactgggagaccaagctggaaagatgcatgtgttgtatatgtcatctccagattgtttttttgagatggagtctcactctgttgcccacgctggagtgcaacggcatgacctcgactcaccacaaattccacctcccaggttcaagcaattcttgtgcctcagcctccccagtagctgggattacaggtgaatgccaccacacctggctaatttttgtattattagtaaagatgggatttcaccatgttggccaggctggtctcaaaactcctgacctcaggtgatccatctgccttggcctcccaaagttctaggatgacaggcgtgagccacctcgccccgcccatttccagattttgtcagttgattttctcccagttcatgtgaacaaagagggcaggttaggccgggcacggtggcttacgcctgtaatcccagcactttgggaggctgaggcgggcagatcacgagatcaaaagttcaagaccagcctgatcgacatggtgaaaccccatctctactaaaaatacaaaaatcagccaggaatggtggcgtgtgcctgtgttcccagctactcaggaggctgaggcaggagaatcatttgaacctgggaggcagaggttgcagtgagctgagatagcgccactgcactccagcctgggcaacagagcgagactccatctcaaaaaaaaaaaacattggccggatatggtggctcacgcctgtaatcccagcattttgggaggctgaggcgggtggatcacgaggtcagaagttcaagactagcctggccaacatagtgaaaccccgtctctactaaaaatacaaaaattagcccggtgtactgggacgcacctgtagtcccagctactcaggaggctgaggtgggacaattgtttgaacctgggaggcagaggttgcagtgagctgagactgtactattgcactccagcctgggtgacagagtgagacttcgtctcaaaaaaaaaaaaaaaaaaagaaaagaaagagggcaggttggaagctagatagatccagactcaaatcttggctggaaagctacttggctgtgacctcgagggagactgctatctccctgagcctcagtttcctcatctataaaatggggtttataacaatacctacctcctaggatggtggtgaggcctacataagctcaggaggtaaagggcttagcacagggcttaggtgtggggcaggcaagagcccagaaagcagaaatctgcagagagagagagagagagaaagaagagcgagcaggcaaaaagagaggaagagatgaaggccagaaagagaaaccccctcagctgctgaaagcagccacctgtgagaaccatgattcctttccacacctgaagtctggatgtggccgggcacgatggctcatgcctgtaatcccagcacttcaggaggctgaggcaggcagatgacttgaggtcaggagtttgagactggcctgggcaacatgatgaaaccccatctctactaaaattacaaaaattagccaggcatggtggcacacacctataatcccagctactcgggaggctgaggtaggagaatcacctgaacccagggggcagagggtgcagtgagccgagatcgtgtcactgcgctccagcctgggcaacaaagcgagactctgtctcaaaaatacataaataataaagtctggatgagggtgcatcagtgggtttctgtccccaccccataagccagcctgacaaacacaggcacactgcctgagaggataagggtgctgggccagggtaaagggaacacagcaacgatggctctgagacccacagagatgtctcagaagaaggcaaggcacccaccagaaggaagcctttctaggaaggatgtgaaacacagaaaccacacaaggggatatttaacatcgtaaaagttccactctatggccggctggacgcagtggctcatgcctgtaacccagaactttgggaggctgcagcaagaggaccacttaagcccaggagttcgagacccaacatggcaagaccctgtctctacaaaaacataaaaaaaaattagccaggtgtaatggctcatgcctgtggttccagctaactcaggagactgagatgggaggatcgctcgagcccaggagttcaagaccagcctgggcaacatggcgagaccttgtctctacaaaaacattaaaaaaaaaaaaaaaaaaaattagctggacgtggtggctcatgcctgtggttccagttaactcaggaggctgagataggagaattgcttcagcctaggagtttgaggctgcagtgaactatgattacaccactgcactccagcctgggtgacaaaatgagaccctgtctcaaaaaaaaaaataaaataggccaggcgcggtggctcacacctgtaatcccagcactttgggaggccgaggcgggtggatcacgaggtcaggagatcgagaccatcctggttaacacagtgagaccctgtctctactgaaaatacaaaaaattagccgggcgtggtggtgggcacctgtagtcccagctacttgggaggctgaggtaggagaatggtgtgaacctgggaggcggagcttgcagtgagccgagatggtgccactgcactccagcctgggcaatagagcaagactccgtctcaaaaaaaaataaaaaataaaataaataaaaccctatggtaaataaaaactaaatataaaataaagaggcaaacactgggataaaaccattgaacaatataagtgataagaatctaatgtgcacctccaccaaaaaaaaagaaacgcagaacagaggccgggcacagtggctcacacctgtaatcccagaactttgcgaggctgaggccgagtcaggaggatcacttgagcccaggagttgaagaccagcctgggcaacatagcaagtctttataaaaatgtctttataaaaattagctgggtgtgatggctgatgcctgttgtctcagctactcaggaggctgaggcaggagaattgcttgaacccgggaggtcaaggctgcagtgagccatgattgtaccactgcactccagctcgggtgacagagcgagaccctgtctcaaaaaaacaaacaaaaagcacaggcacacaaggaaaatctgtttgaatgtaacacaaatgagtttgacatcactagttaaaagcaaagatcctaggttcaaatcccaccagctatgtgaccctggacaagatatttgatgtctctgaccctcagtttcttcaaccataaaaggggattgataataatagcacctactgcacaggttactatgaagattaaatgagtttgaagagtgcttggcacatagtaagtgctcaataaatgttagtgaccacattatttatcatcaccattatcagcctcccttgtcctagccctgctcacctgagctatcactgtctaagaatggggctgtattggtcatccctgtgtcctcaacactgaccagcaagggaccaagcacagagcagggactagggagtgtttgttgaccaactgaatgaatgaatgagagaaaaagggctgcttgcccgttttttctattgtttggttttgagacacggtctcgctctgtcacccaggctggagtgcagtggcacggtcatagctcactgcagcctcaaccacctaggttcaagagagcctctccactcccttcctcccaagcagctaggactacagacatgtgctaccaggcaccacatccagctaggttttctatttttttttttactttttgtagaggtgggatctcactatgtcgcctaggctggtctccaactcctggcttcaagcgatcctcttgccttggcctcccaaagcgctgggattacgggcatgagccagcctgtttttgagatgggctcttgctatgttgcccaggctggctcaaactcctgggcttaagcaatcctctggccttagcttcctgagtagctgggattacaggtgtaccccaccatgcctgactccccttttttctagatgagtcaagtcaggtccagggagcctgactgatcatttattttttataataaaaatagctatcattaccgctagtctatttttttctattattatgattactctttattattattattattattatttttttttttgagacgaagtttcactcttgtcccccaggctggagtacaatggcacgatctcagctcactgtaacctctgcctcctgggctcaagggattctcctgcctcagcctcccaagtagctatgattacaggtgcctgccaccatgctcagctaatttttgtatttttagtagagacagggtttcaccatgttggccaggctggtctcaaactcctgacctcaggtgatccacccgccttggcctcccaaagtgttgggattacaggcgtgagccaccgcgcctggcatactctttatttttaattgttattgtcactattatttttcttttttctttctttctttttagaggcggggtctcgctatgttgcccaggctggagtgcaatgcctcttcacagatgtgatcccactactgatcagtaagagagctttgacctgctccatttccaacctgggctgctttgcaacctggtggtcccccactcctgggaggtcaccacatggatgccaaacttaatgaggacacctgatcagcacagaactcctgggatcaagtgatcctcctgcctcagcctcctgagtagctgagaccacagacacgtgctaccatgcccggcttattttttctattatggttattattacttctgtacgattatggttccttttttttttttttttttttcttgagatggagtcttgctctgtcgcccaggctggagtgcagtggcgcgatctcggctcactgcaagctccatctcccaggttcacaccattctcctgcctcagcctcccgagtagctgggactacaggcgcctgccaccatgcccggctaattttttgtatttctagtagagacagggtttcaccatgttagccaggatggtttcgatctcctgacctcgtgggcctcccaaagtgctgggattacgggtgtgagccactgcgcccagcctgatgatggtttctgttatctgctattgtgactcccccaagtgtctgcttgaccccctaggcatacagggcctctccaagctgacacctgatggggaggggcgggtggcagcgggcagggcagacgcacctgggtgatgaggaacttggtgaggcgctcaggcagccggcccttctcactggacaggatcatctccaacatgtccccatgcagcttctccatcaccacaaacactttctcaggcgtctcgaacatgcactccaggttcacgatcccgggatgccgcaggctctgcagggtggggagcggggtcagggcccaggtaacccacaaactcagaccccaacgggtcaggtataggagcaggaggatgacaaacaaggagaaggatgtccctggggtattggcacttggagagggaagggggcttcccacaggccaagacagaacaggcccacctccaccccacctgccaggtgcccagaaggatcttttttttctttctatttaaatatagagatggggtttcgccatgttggccaggctggtctcaaacttctggcctcaagtgatcctcccacctcagcctcccaaagtgctgggattacaggcgtgagccaccatgcccggcccagaaggatctttacatcctgaaattctggtggaggcccagggttgcaggagggaggagggggagcttggagaaatggggagagctctgcacatctgtatcttttaaatccataccccctctcacattctccagtcctatcctggcctaacccctctctcccacccagatccccactcagcctcctggctacaatcacttccctttccacccaccctccagatggcagcctgcgggattttcctaacgtacacacctgatcctgcccctcccttgctcaaaagccttctgtggctctccagtaccctcaggagaaagtccaaagggtctggctccgccctcctccctggcctcatctcccagtacctcctttctagaaaacctcatgctccctctcaccaggtctttgtacaggctggtccctctgctaagaacaccttctccccttcagtctcaacatgcacatgccctcccccaggaagccttccctgaccacccctacactgggtcagctggcccatgaaaggaagaagcagaaagggaaggcggcctggtggttacctgcagaatggccacttcattccggagctggctctcctgcttggtagggaagcgcagtttgtcaatgaccttaactgccacgtcccggcctgtcttccggtgttttcctgcacagggagtagaagagatgggggatgagagagcaagaccacccagtcctggcaggagtatctccacctctgccaacctctgccccccaccatggagacagccagagttgggcagagttggaaggccccaggagatacgtgaaaaggccacctgaggtgcaccttgggagtaaaggcagaaagaaggaaagcaaaaaacaaacaaaaagctccgaagaagggaatgtataacatgggaaactggatttataaccagtcggaatctagcatctagttttgtgtgacccgtaagagtcctggggacaggggagagacaccagcaccaggggaggcagactgaccatattatacagagaaggaaactgagtcttagagtttagagtgtagaagttaccctccctgtcctattgaactctaggatctagctctgtggcaaatcaaagtgtaaaatttaccacccgccccatacaatcagaatctaggatttagcctgtggccaatcagaatgcagaatctaccctccaatccaatcagaatctaggatctagacctgtggccaatcagaatgcagaatctaccctcctattcaatcagaatctaggatctagctctgtggccagagtgcagaatctaccctcttttccaatcagaatctacgaactagttctgtggccaatatgaatgcagaatctactctatccaatcagaatctaggttctagctctgtggtcaatcagagtgcagaatctaccttccctatccaatcaaaatctacctctgtgaccaatcagagtgccgaatttacccttcctattaataacaggaggaatgtccattggtttttcccaatgagaaaaggagaacctgcaatcagtccacccaggatctagctaagccaatcaacatgggaggtgagcatgtgaccaatcagaaaggaagggttggagccagaaagaaagggctggagccacagcagcttcccccagcccggggctccctctgggttagctctgaagtgtcctcacctccatagaccactccaaactgccctgagcccagcacttcgtcagggaagatctggtagacagtggcaatgtcctacagggtgaagacagggcaggtcaggggtgcaaatggaaatggggaagggggagtcaaggagacgagagagctgaggagggtttgtgggaggggagggcatcaggtgggggcaggagtctcaccacattctcttggatctgactgttggacacagagatgctcagagaagcttgtcctagggagaggggagagacagaggtgaggggactccaggctcaggattatctccacccatacctgcaaaagcagacttgggagtcaggccacccagatttgaatccaatgttcgatacaatgtgcaacttcaggctggtgacttgtccactacgaacctcagtttcctcatctagaaaatgggaataataaaaggacctccctcatagagccaccaggaggagtaaatgagatgtgctgagtggctaaaggagtgatgttacagatgattttgctgagcattttaccccaggatctcagcaccaggggaggcagactgaccccattgtacagagaaggaaactgagtcttggagggaaagcccagactgactcctgcatcttcccttgaacttttccccctacaaacccaaccagagccagacatttctaaagtccgatccttctgccatttgaatgtctctctcttccaccagtctaggcccctgctcgccccccaactctgggtcctcaccccacagccccttccctggtctccttgccccaatcctgccccttcctactcacctcccacagagaaaccagagggatcttactgaggcacaagactgaccctgtccctcctctgctcacaactctgccatggctccccagtgccctcaggaagaagcctgagccccttaaatggcctaaaagccatggcctagaccctcatctacctctgacttctacccccaacatgctattcctgacacactggcctccttgctcggcctcaaatacagcaaactctcttctgccttctggtctctgcatatgctgtttcccctgccaggaatactctttccttcatcctagacttagctaaatcctcctcatcctcaagtgtaagctcaaatgtcactcctaggaccaagttggattactctcgcaaatgctctgcatcacactcgttgcttgtatgggttaatgatcaatgtctgtcacccacactggattataagctccagagggtgggaacctggtactctctcaacattttttgcctctgcctaaaatgacctcccattttctttcccacatctcaccctgcctcggcctccagatctcagttcagatgtcacctcctccaggaagcccccctatatacccagattgggtcaggtacccctctgggctcctctagctccctagcttccttgtcccaaccctgcccaccctggactgtcactctctgaagatgggtattctgccctactggactctgagccccatgagggcaggtcttgggctgtcctggccaccactgggtccccagcactgtcccgcacagaggaggcactcagtaagtgcatgaggacttatcagcacctgggacaaggctcatggaggggaagtgatatgcccagggccacatatcaggccaggagcttaacagagatttgttgtggatttttgttgttgttgttttttctgttttggagacagagtcttgctctgtcacccagactggagtgcagtgatgcaatcatgactcactactcccaggctcaagcaattctcctgcctcagccttccaagtacctggaactacaggtgtgcaccaccacacctggctaattgtttttattttttgtagagatggaatctcattatgttgcccaggctggtcttgaactcctggcctcaagtgatcctccctccttggcttcccaaagcgctgggattaacaggagtgattaacagagtttgaacccaggcctgctgagtccagaagctgcgttctcaaccccaccattgcccactttcctctttggcccttccattccccagaaccgtgccccacccatctagatctattctctcaaggacccgaggtgggaggacttactgtggggcgcgtggcctggggcgctgggtgcgtcctgaaggatgacgggcatcagggcctggcggatggctgtctcccagccccgggcggcctcagccccctgcccacttggcccacccggagtcccgccaggcatctcgcccacgaagtaggtggcattggcagtgacgatctcaaagcagtgtgggttggtgcccggcggcacaaggctgaagttctgggcggactccaccgtgaggatttctgacagcggaatttcctgcaggacgtggaaccagcacaggtgaggatgccaggcagaccttggaattctagtgcttacccagaaggatacacgggatccatgttgatagggatgggcctggtttgcacagtggtcagacaagttcccagtaattctaagcctgttctcactgttcttttataattactggcagaggccaggtgcggtggctcatgcctgtaatcccaacactttggaaggccgaggtgggcagctcacttgaggtcaggagttcgagaccagcctggccaacatggcaaaatcccgtctctactgaaaatacaaaaattagccaggcgtggtggtgtgcgcctgtaatcccagctaatcgggaggctgaggcaggaaaatcgcttgcacctgggaggcggtggttgtaatgagccaagatcgcaccactgcactccagcctgggcgacagagtgagattccgtctcaaaaataataataataatactaattactggcagaagtgatattgaagcagagaccagaaaggtaagaagcagccagttggcaaggagtaggggaacagcatgtgcaaaggccctaaggaaaggctatgctcaaaagccaagctgtatccccatcacatgggcggtgcctggacatagtaaaagcttgataaacatttgatggccggatgtggtggctcgtgcctgtactcccagcactttgggaggccgaggtgggcagatggcccaggagttcaagaccagcctgggcaacacagtgagaccccagctctacaaaaaatttaaaaattaggcatggtgccacaagcctgtaatcccagcactttgggaggccaaggcaggcagatcgctggagcccaggagtttgagaccagccagagcaacacaatgagacccccatctctacaaaaaataaaaaaactagccaggtgtggtggtgcgcacctgtaatcccagctactgtggaggtgggagaatcatttgagccagggaggcagaggttacagtgagccatgatcatgccactgcacctgggagacagggcaagagcctgtctcaaaataaataaatgggctgggcatggtggctcatgcctgtaatcccaacactttgggaggccaaggcaggcggatcacaaagtcaggagttcgagacccgcctgaccaacatggtgaaagcccatctctactaaaaatacaaaaattagccaggcgtggtggcacacctataatcctagctacttgggaggctgaggcagaagaatcacttgaaccccggaggcggaggttgcagtgagccaagatcgcgccactgcactccagcctgggtgacagagcgagactccgtctcaaaaataaacgtttgataataaatggaggaaatgaggccacacagggctttgcgggccacaaggaagagcctgggctttgtccaagggccctaggaagccactgaaggcttttgagcatcatccgcttgtgtgcggagggcagatggaatagaatgagatggagacagagaaccaggaaggaggctgaggggacccaggcgggacagaaggcacagggactatggggtgggaaacgtgtcaaaagaggaaggagggaggtaggagagaggaaagaatgaatgacttaggcagcccataaaaccaggtgatgacatggacacgtcgggggggcatggtgaggacagcattatattttattttattttatttttttgagatggagtcttgctctgttgcccaggcaggagtgcagtgacgcgatctcagctcactgcaacctccacctcccaggttcaagcaattctcctgcctcagcctcccaagtagctggggttataggcacccgccaccatgcccagctaatttttgtatttttagtacagacaaggtttcaccatattggccaggctggtttcgaactcatgatctcaagtgatccgcccacctcggcctctgaaagcgctgggattacaggcgtgagccaccacgcctggccaaggacagcattttagatggtgtggtctgagcaaaatgggaagatgataaggaaccagccatggaaagttcaaggaagacgctccagggcaggtaacagctggagtccaggttttattactctaagacaatgggagccactggggggtttgacggttttaatgaagactcccctggctgtgggggaaatgacagaggttgtgaggtcagaagcaaggaccctgcaaggagaaggctgaaaccatccaggtggaagacagtggctgggacacagtgtgggcatgggaggtggtgacgaatacgcacacaatgcaatacattaattataaagaaatagtgaggccgggtgcggtggctcatgcctgtaatcccagcactttgggaggccgaggggggcagatcatgaggtcaagagatcaagaccatcctgtccaacatggtgaaaccccgtctctactaaaaatacaaaaattagctgggtgtggtggcattcacctgtagtcctagggtgggaggctgaggcaggagaatcgcttgaacccgggaagcggaggttgcagtgagccgagatcgcgccactgcactccagctgggcgacagagtgagactctgtctcaaaaaataaataaataacaaaaaataaaggaatagtgagaacagccttagaattactgggagcttaatatataccacgccttaagccaattggtttagtggattggctctttgaattctcgcaccagccctgaggtgagtattagcatttgaggcattttgcaggtgagaagcgtgaggcactgagaagtaagggaacctgcccggagtccccctggctggaaagtggtggggccagaatcggatgggcagcacttgctgatgagctggaagcagggaggctgggggtgggcagagggtgtgatttgcaggatctgtctggagtaactgggggtaggaggaggtgtgggaaagtttgtgggcacagcgggaagtccgagggagctgaaagcccggaggcttaccttatagtatctgttggtcgtgttgttctggaagagcgtgatacacttgcagtccaggcgccaatagtgccgctttctctgcagagatgtttgaagagtcacgtgaaccgccagactttcctgcccagtccctatcccgtggagctgcttggggctccaggtgcctggagcaccacgtgcacgccgtaactctagcacctaccccacgccgtaaccccaccccaccacacgccctaaccccagccccgcccctagccttaaccctagcccagcccccacgccctaaccccagactcgcccccacttagccctcttcctccagccaagctcctcccctaactctagccccgcccctgaccttgccctgagccccgggtcttccctaactcctgcccgtagtcccacccttacagcccacacttctaattctagccccgcctccagcacggcccagcccactactggccccgctcgcgcctagctccagccccacccacctagccccgcctactcaagctgagccgcccctcttccagccttcgctccgccgtacccggccccgccccggccactcaccagcgtgtccttgttgctgtaatgaaccacccaaccctcccgcagcgtggtgctggatttccgcgtcgtgtgtcgcaccgattgcaccaccctcattagggggatgtaccccagggagctgcgaaggaagaggaaggggtgagaagtcacatgcagaaagtgaccatgctgcttgggaatgcagggggcatctctgggaaactagggagttggggactgtttttgtttgtttggtttgttttgacattttccccccaacacacacccgggagttgctttttgtttgtttttaagaggctcgctctgtcacccaggctggaatgcagtggtgcgatctcggctcactgcaacctctgcctcccgggttcaagcgattctcgtgcctcagcctcctgagtggccgggacaatcacggtgaccattaggtgcacgccaccacccctggctaatttttgtatttttagtagtgatgaggtttcaccatgttggccaggctggtctcgaactctttgcctcaactccttccctaactcctgcccctagtcccacccttagaatcccttcacgagatccatccgcctcggcctcccagagtgcttacaggtgtgagccaccacgctggcccagaaggagattcttgagagggcttctgtagtaggcctttctgaagtcaggctgcctagcaaattacctaacctcttcatgcctcagtttgtccacccaaaggggatgctatgaggaatggaaacctttctacggagcttagtacagtgcctggcatacagaggacctccagtaagtgctaattggtatttagtccagcaattgtggagccagctgtgtgacactgggtaagtgattcaacctctctgggcctcacctccctcatttgtgcagatgctgttagtacagtaaggaaggtctacagagattaagtggcctgctgggcatggtggctcatgcctgtaatcccaacactttgggaggcagaagtggggggatcacttgaggtcaggagtttgagatttgagagattaagtgacttgctcaactctggaaccaacaatctctggatccctgtgctagatcagaacctgggtggccttgatcacatctctttgcctgagactcagtttccccatctgtgaaatgggctgcctctccccacacccgccacccccaatccctcaaggtccaactcttgacagtgtatgacggtgttactaggcattcccaggaaagacgtgggagaaagggaacctgcggcttcaggctgcttgggttgggaggcaccgcaggaaacactctgtcgtcactgtgactggcttacccatcccctttctgtccaaccctcttcccctcgccctccctgctgcagctacatgggtctctttgctgtccctggaacacggtgcctccaccccagggcctttgcactcgctgttgcctctgcctggaagccttttcccccagagccccacaaggctccttccctcccctcccttcaactgccacttcctcagcgaggtctccttgaaggaccctaagatagcatgtcccccattctccatctcctcttgtttttatcaccattaccaatacccgatgctatggatgcatttattagctgtctccccactgaggcagtcagctccagaagggcagacttttacctcttttgttcatagctgtgtgcttgaacacagcaggtgctcattaaatattttccagtgcacctgtgagggtgcccccttacccctaccccaggtttatcaccccgtggggtaggtacctcatcgccccaggaggaaaccgtggcacacagggaagcgcctagcaagtgaagtggtagagctgggatctgggctgtcaccctccagcgcctgtgtgaactgtgctttctcaataaacattcacgccacacccagataggaagtgcctgatctgagccagtcctgtcctaggcacctgggagggcagaaaatatccttgccctcatgcacctgagctcacattccagtggagctgactaagtatgaactccgtgtatagtttaaaaatgtgtaggctgggggcacagtggcacacacctgtaatcccagaactttgggaggctgaggtgggaggattgcttgagcgcagaagttcaagaccaccctgggcaacatagcaagaccccctatcttaaaaaaaaaaaaaaaaaaaaaagaagaggaatataggtcaggcgcggtggctcatgcctgtaatcccagcactttgggaggccgaggcaggtggattacctgaggttgggagttcaagaccagcctgaccaacatggcaaaaccctgtctctactaaaaatacaaaaaaagtagctgggcctgggcgggtgcctgtagtcccagctacttgggaggctgaggcaggagaatcgcttgaacccaggagacagaggttgcaatgaactgaaattgcatcactgcactccagcctgggcaacaagagcgaaacgccgtctaaaattagccagggatagcagtgcatccctgtagtcccagatactcgggaggctgaggcaggaggatcacctgagcccaggagtttgaggttacagtgagccacaatcacaccactgcactccagtgggcaacaaagcaagaccctttgggaggctgaggcgggtggatcacttgagctcaggagtcaggagttcaagaccagcctgggcaacatagggtagaccctgtctctacagaaatacaaaaattagctgggtgtggtggacgagcctgtggtcccagctactcgagaggctaaggtggcaggatcgcttgagcccaggtggtcgaggctgcagtgagtcaagactgcaccactgcaccagcctgggcgacagaccgagaccctgtctcaaacaaaaaattatttaaaaaaaattgtagtgctttaaaaggtttgcctcaggaactgggaaaatttataaatatgaggtgatgtcagcccattgtagagaaaaagaaattgaggttcactgtgcaggagggtcttcccccagggtctcttggagggttctgtgtatacctctgggccttgcctccctcgccttcctcctcctcactggcgtggagcgcattctctgagtgggagccagggatgacaccggagtcctctgactcatccatgagggcgctcttgtcagcctcgctgaaatcggtggcctcctccatcggcacatctgtggggacggaggcatcagaggggtctccacccagtcctgccccttcccctttctccccagcatccccccagcctctcacctccattgataagggcctcccccaggcagtcattagggacgcgggtggcgcagcgtttgtgacagttaaacttgcagtctggtaggacagggaacaagggaacgggtgagaaggggaagagaggttacctggaaggcttgaaccttgaccctaagcctcaggctcaaaagagtctactcttgctgtctgggtaagaacactggctgctgctgccctggtcattttcccactttcagccacagttttcccaaccatcgggggggtcttgattaagtaggagggctagactcaaaatcccgacgactgctgggtgcagtggctcccgcctgtaatctcggtattttgggaggccggggagagcagatcatttgaggtcaggagttcgaaaccagcctgccctacatggtaaaacctcgtctctactaaaaatacaaaaattagctgggcgtgggactacaggcgcccactaccacgcccagctgatttttttgtgtttttagtagagacggggtttcgccatgttggtcaggctggtttcgcgctcctgacctcagatgatccacctgccttggcctcctaaaagtgctgggattacaggcgtgagccaccgcgcccgacttgtgtgtgtgtgtgtgtgtgtgtgttattggttctaatgtgctgtgactccagactctgaacaccctagggctgggttcctcaacccgtgacactaacacagtgcccaggataattccttgttttagggcacttgctctgtgtattgtaggatgtttagctgcatctctgacttctacctactggatgccagtagcactatcccagcgtaccaaacaaaaccatctccaacccttgccaaacatcccctaggagcaaaacggcccctggtcgagaaccattgctgtagagttcagtgtttccacggttctagggacactatacatcgaagattctagagtttactaaaaacctattttatgaaggttctatgattctgttttttgttttttttttttttttttaagaaacagtctggctgtcacccagactagagtgtgcaatggcaccatctcggctcactgcaacctctgcctcccaggctcaagcgatcttcccacctcagcctcctgagtagctgaaactacaggcacgcactaccatgcctggctaatttttcgtattttttgtagagatggggtctttccatgttgtacaagctggtcttgaactcctgggctcaagcaatccacccacctaagcctcccaaagtgctgggattacaggtgtgagctactgcccctgacctgattccgtatttctaaggcttcagagtttgatgtccaagtttctagaactctagacatctatgagtcaacacttctaagactctttaatgtccaagattttagggtgttatatatctaaactctaaaatttgacagttctagggttctacaattctaggcttctctacctccagaatctgcagattccaaggttctaggattctatacatacaagattctagaatttgatgtttctatgcttctttagctctaggcttctaagattctagaatttgattgttccagtaaattcttgaattggatgtttctaagtttatgtggatctaggcttctgaggttctagaatttttttttttctttttttgagacaagttcttgctctgtcacccaggctggaatgcagtggcacaatcatggctcactgcagcctcaacctcctgggctcaagcaatcctccctcctcagagtcccaagtagctggaaccacagatgcatgctgccatgcctggctaatttttaattttttttgtagagacagggtttcaccatgttgcccaggctggtcttaaactcctaggctcaagtgatccacctaccttggcctcccaaagtgctgagattacatgcatgagccaccacacctggctggattctagaatttgattgttcaaagttctgggagtctagaatttccaggattctaggttacgatggtttcaagcttatatgattctagacgtctaagactctcaaatttgatgtgcctatgtttctattaccctcaaatcccatggttccaaaattctcatgctctgagagtctataacttgggagatctaagatgtgtaatctaaagttctgttgttattttagctgaattctatcattcggaattcttgaatgctatggttctgattctagaattctcaggttctacagttttagaattccatgctaagcacgttatgaatctaggattccaaggttctaaagactgaggttcagctgggcgcggtggctcacacctgtaatcccagcactttgggaggccgaggtaggaggattgcttgagcccaggagttcaagaccagcctgaacaatatagtgataccttctctctacaaatgatttaaaaattagctgggtgtggccaggcgcggtggctcacgcctgtaatcccggcattttgggaggtcgaggcaggtggatcacaaggtcaggagatcgagaccatcctagctaacatggtgaaaccccgtctctactaaaaatacaaaaaaattagccaggcatggtggcgggcgcctgtagtcccagctactcaggaggctgaggcaggagaatgtcctgatcccaggaggcagagtttgcagtgagccgagatcacaccactgcactccagcctgggcgacagagtgagactccgtctcaaaaaaaaaaaaaagaaaagaaaattagctgggtgtggtggcaccacctgtagtcctagctacttgggaggctgaggcaggaggatcacttgaacccaggaggttgaagctgcagtgagccgtgattgcgccactgcactccagcctgggtgatagagtgacaccctgtctccaaaaaacaacaacaacacacacacacacacacacacacacacacacacaactgaggttctaagattccagaattccaaaggtcccagaacactaggattcagggccctccccttctgaggccctggggtcccaaggctcagatccttgtgtcctgccacaagaccaggttggggcgggaaggaggttctgaccctgtctgtcctccccgacaggcccagctaacctttgcattgcaggccctgccggaagaggcccttgaggagtttcttgcaagcctggcaaacggtgggccgtgtatagctgtggatgaggaaggtgtgcggcaccttgaccttggagagcagcatcttgtccagctcaatggggcggcccgtatacgatgaggcagaagaggaggaagaggatgacgggggacggcgaggcaggagttcggtggtgctacggctctgtcgttggcaagaatggaggggacacatcagtgcgttggccccatgcctgggccaagtcacccccctagccaccaacccgtcccatcccccatctcctcaccagctcttcagccgtgcagggcagggactcggaggtgccgaggcgcaccgagtggccactggccagagacgtggatgacaggcgccgtttgcgggccccactacagttgttggggatgctgaaggcacagcgcttgtggtagttcagcccgcagcctgcagggggcgccagagagtaagagacatggcgtctgcccctcctaggtctcttcttgagaagttgtgccctttccacccaatctctcacctggtcctgtcccatcaccccccgccagcacgatctcctccaaaaggcactactatccgtaagtgtatcagccccttcaggcccacccctccttagagttctgccccaagttccagcttgtagccccaccatcaccccatctgtcccccagaccctgaacacacccacaccccttttctcactccaacaagggacacctcaaaggctccccccaaagctctgtccccagtttcagcttgtagccctgccatcaccccatctgtcccccagaccctgaacacgcctcacacccaaaattttcccactccaacaagggatacctcaaaggttccctccaaagctccacccctagttccagcttgtagccccgacatcaccccatctgccccccaggccctgaacgcgcctcacaccccaccttttcccactgcaacaatggatgcctcaaaagtccccgccaaagctctgacccagccccagtcctctatggtaagcacctccttctagtcctccccaaaactcctgtccatctccctagagacacctgttcccccttctaaccctgaccttcctttttctgaggcccctttggttccccctctttccccaaccccaactttccaaaagaaaatgcctctcctcacccccacccctaaggtcactatccctccaggtctgctcaccccctgtaccccactttctcttttctgtagacctggaatccaggcaatccctaagtagtgtgattaaatcttagtagtgtgggccacgcatggtggctcacgcctgtaatcccagcactttgggaggccaaggccggcggatcacttgaggtcaggagtttgagaccacactggccaacatggcaaaaccccatctctactaaaaatacaaaacttagccgggtgtagtggcacacgcctgtaatcccagctactccggaggctgaggcaggagaatcacttgaacccaggaggcagaggttgtagtgagctgagatcacgccactgcactccagcctgggcaatacagcgagactcagtttcaaaaaaaaaaaaagagttctcagttgtactcaggtccattgtaccatactaggcagaagtatgacttcttattgtcttattttattttgtagagacaggatctccctgtacccccggctgaagcacaatggcacaatcatagctcactgcagccttcaactcctgggctcaagtaatcctcctgcctcagcctcctgagtagccagaaccacagacatacactaccatgcccagataatttttttatttttatttttttgtagagatggggtctcgctacattgcccaggctggtcttgaactcctgggctcaagtgatcctcccacctcagcctcccaaagtgttgggattacaggcatgagccactgtgccctgcctattttatcttttaaaatcctcatccatggagaaatcagctcaactccctgtttcccactggacgttctgtatgtgtgctctaatacatctccagtgattccaaacgattccaggatcgctttctattctggagtgaagaatgttcctccagcctttgggagcccttctggtacccgcctgctccaggctttccagttccacacctcctcattgtaggcactgtcttggctgcatgctgtaatcacggaggcaagcttggagaacggtgttggccctgcaagaagagcttcagcagggcaaatggtctttgcacacaggaaccatttcccagtgttggccttgaatcactcatgtgccttccagaatttcagaatcttatctataactctcagaatgagtctcaggatagagttaaactcctgtcggaatgtagtcatttggggttctcttgccaccataggaactgggaccatcatctgtgatgctgcaccagtgaagtctgtgctgataacccattaggacttgatgacaccagggctgtatcatgacaaagactgcatatgctgagacctcaagagttggatatggtgtgtggacgatggcaatatttataagagcttttaatgcactgaatcagtatctgcaggcctagagtccttaaataatacaagtatactttggactgcatgatgatctggaacacaggatattggagaaactggatttcttttttttttttttttttgagacggagtctcaccctgtcacccaggctggagtgcaatggtatgatctcggctcactgcaacctccaccccctcaggttcaaatgattctcctgcctcagcctcccgagtagctgggattataggtacccgccaccacacccagctaatttttctagttttagtagagacagggtttcaccatgttggccaggctggtctctaactcctgacctcatgatccgcccgccttggcctcccaaagtgctgggattacaggtgtgagccaccgtgcctggcccagaatcaggatttctgtacaagcgtggcacccacggagctagagatgctgtctcagacctaatacccaatggaacatccaagaatatggctctaattgcagggcacaccatacaaaaatggaggcgcatggggcccagcgcagtggctcatgtctgtaatcccagcacttggggaggctgaggagggtggattacttgaaaccagcctggccaacatggtgaaaccccgtctactaaaaatacaaaaattagccaggagtggtggtgcgcacctgtaatcccagctatttgggaggctgaagcaggagaattgcttgaacccaggaggtagaggttgcagtgagccaagaccacgccactgcactccatcctgggtgacggagcaagactctgtctcacacacacaaaacaatggagccacagggtctcatcacagaatggatggtcctcacctgtcatctgtcctcatagccaatgcaggtacatggccttcatctgtaggcagagccccgatttcaacattctcactcagaagcatgaataacagggacagaggacctatatagatcttgacacttgggctgaaccttgagacatcttggcttaaagaactgtatgttttggacaggcgcggtggctcatgcctgtaatcccagcactgtgggagggcaaggcgggtggatcatttgaggtcaggagttcaagaccagcctggccaacgtggtgaaaccccgtctctactagaaatacaaaaattagccgggcagtaatggtgtgtgcctgtaatcccagctactcggtaggctgaggcaggagaatcgcttgagcctgggaagtggaggttgtggtgagctgagatcgcgccactgcactccagcctgggtgacagactgagacgctgtctccaaaaaagaaaacctgtatatttttaaactatgatttaaggagatatgtatgggtgctgttatggactaaatgtctgtgtctcccccaaaattcttatgttgaaaccctaacctccaatgcaactatatctggagacggtgcctttatggaggtaattaaggttaattgaggccgaaagagtgtggctgtaatccaatgggactggtgacctttttttttttttttttttttttttttctgagacaatcgtgttctgtcacctaggctggagtgcagtggcatgatcacggctcaccgcagcctcaacctcccaggcccaggtgatcctcccacctcagcctcttgagtagctaggactagaggtatgcaccaccatgcctggccaatttgttgtattttttagagacggggtttcaccatgttgcccatgctggtctcgaactcctggactcaagcgatccaccatcctcccaaagtgctgggattataggcatgagccaccatgcctggccttccttataaagggaagagataccagggatctctctctccgtgtcccatgtgagcgcacagtgaaatgatggccctctgcaaggcaggaaagcaggctacaccagaaacagaaccctgccagaatctggatctttgtctttccagcctctcacaattccagggattttgagaagtaaatgtctgtcatttaagccacgcagggtggtattttgttaaggcagccctgacaaactaagacaggtgccaggttgacaagagatggaccctgatagtcatgttaatgtgtcagcttggctaggcgagatccacagttattcagacactaatctagatgttgccatgaaggttggtttgtttgtggtttttttttttttttttttttttgagacggagtctcgctctgttgccaggctggagtgcagtggcacgatctcggctcactgcaacctctgtctcctgggttcaagtgattctcctacctcagcctcccaagtagctgggactataggcacatgccaccacgcccgctaatttttgtatttttaggagagatggggtttcaccatgttggccagggtggtctcaatctcttgacctcatgatccgcctgcctcagcctccaaagtgctggggttacaggtgtgaaccactgtgcccagtcaaggtttgttttttcttttcaccttctcaacccagcttttccccgactccaggaagaactgggaagagaaggccccatggaggtattttcttttcttttcatttttttgagacagagttttgctcttgttgcccaggctggagtgtaatggtgcaatctcagctcactgcaagctctgcctcccgggttcaagagattctcctgactgagcctcccgagtagctggaattacaggcgtccaccaacacgccggcttttttgtatttttagtagagacggggtttcaccatgttggacaggctggtctcgaactcctgacctcaggtgattcacctgcctcggcctcccagagtgctgggattacaggcgtgagccaccgcacccggcccagtggaggtattttctggatgtgatgaaaatccataatcagctgactgtaagtgggagaggtgatcctgcttgttctaggtgggtctcattcaatcagctgaatgttttaaaaagcagatcagagacttttcggatgaagaaattccacctgtggacatcagcttcagcttgtgcctgagttcccacttgcccttcctgataggatggatttttttttctttttctttttattgttttgtttttgtttctgttttcagaaggagtctcactctatcaccaggctggagtgcagtggcacaatctcggctcactgcaacctcctcctctcaggtccaagcaattctcctgcctcagcctcccaagtagctgggactacaggcgtgtgccaccacgtccggctaattttttgtatttttagtagagacggggtttcaccatgttagccaggagggtctcaatctcctgacctcgtgatccacccgcctcggcctcccaaagtgctgggattacaggcatgagccaccgtgtccggcctttttcctgtttttgagccagggtctcgctctgtcacccaggctggtgtgcagtggtgcaatcagggctcactacagtgtcgagctcccaggctcaagtgatcctcccgcctcagcctcccaagtggctgggaccacaagtgtctgtcaccatgcttggctaattattttttgtacaggcagagtcttgctatgttgcccaggctggtcttgaactcctggcctcaagtgatccacctacctttgcctcccaaagtgctgggattactggcctcccccactgtgcccagccagatttgagttgcctagccagcccacacaattctgtaagctgattccttgcatataaatatctcaatatatatctcctcctggatgtttctctgcttgatccctaactgatagaggccccaccctcttcccccgccacccttctgctcccctaggctctgttcttaagcccctacttgtccctcccagctccacctcctaggctccgcccctagacctgagccccggcccagccccaccactccttccccaagctctgcttctgggcccatccttcttcccattattacttcctaggctgcgcccccagctctgagacccgctcctcctccccacgctgtccccgtgccaggaccattacgctccgcccccggtgcagagccccgccccaggccccgcccccaaccctttagctctcaccatcgcacttgaggccctggcgcactaggccgaagagcatctccccgcagtgatcacagaaggcaggcgcccgataggagtgcaccgtgagggcgtgcgggcggatctggaagtcctcgaaggtggccgaggctgtaggcggaaaataggggtggatgcttgaggcggggtaggccaaagcttttccagaccccacgttccctgatttctcacagtgctcccagccgcaaggtgtgatctttccttccttccttcatttgctctcatactacattctgcctgggttcaaatcccagctccacccctgaacaaaacacatatatccctacgccctgggcagggacagagcgggaattggggagttgtttaacgggcaaggagcttcagtttcgcaagatgacaacagttctggagaccggctgcacaacagtgtgcgtgaactttaaattactgaactgtacgcttaaaagtgcttaaaatgttgtgggcttttttgtttgtgtttgttagagagtttcactctgtcacccaggctggagtacagtagtgagatctcggctcaccacaagtccgcctcccgggttcaagcagttctcctgcctcagcctccagagtagctgggattacaggcatgcgccaccacacccgactaatttttgtatttttagtagagacggagtttcaccatgttggccaggatggtctcaaactcccgacctcaggtgatctgcccgcctcggtctctcaaagtgttgggattacaggcgtgagccactgcacccggcctaaaatagtaatttttatgttatgtatattttaccaaattaaaaaatttttaattaaaaataccaccaccaacaacaaaaaagaacatggataggcggtgcccggtggctcacatctgtaatcccagcactttgggaggcccaggtgggcggatcacttgaggtcagaagttcgaaaccagcctggccaacatgatgaaaccccgtctctactaaaaatacaaaaattagccaggcctggtgccgcgtgcctgtaatcccagctactcaggaggctgaggcaggagaattgcttgaacccgggaggcagaggttgccgtgagccaagatcatgccacggcactccagcctgggtgacagagtaagattctgtctaaaaaaaagaaaaaaaaaaaaagcccagtgtggtggtgcatgcctgtaatgcctatagtccagccacctcaggaggctgaggcgggatgattgcttcagtctgggaggtagaggctgcagtgagtggtggtcatgccactgcattccagcctgggtgacagaacaagaccctgcctcaaaacaaaataacagggccgggagcggtggctcacacctgtaatcgcagcactttgggaggctgaggtgggcagatcacttaagatcagcagttcgagaccagcctggccaacaaggtgaaatcccgtctctactaaaaatacaaaaattagccacgtgtggtagcaggcgcctgtaatcccagctactcgggaggctgaggcaggagaatcgcttgaacccaggaggcagaggttgcagcaagctgagtttgcgccactgcactccagcctgggtgacagagcgagactccgtctaaaaaaacaaaaaataataaaaatgacaaaaacaaaacaaaactcaggtttaggggagagacaacaatgaagataaaaattcaagtgaggccagcttatgatatgaaagagtacttaaagcctgaacaaggtcactaaaggtgtaaatccagacttctgtcattcattcattgagccggtttcactgggcactgcagtatgccggagcagcagggaaggcagccatgaaaaaggcagctgcccccaccctcaagagggaccaagggccatagactgctctaaggtgctgagagcatgcccatctatactactggaatagtgagtggatgaactggcttctggctgtgtcttagaaaatcacctgggggcttttaaaaatactgatgtgcagattccatctcactttgcagagattctgatttaatttagcattttcgtggcaggagccatggacatcataacttttttttttctttttctactttttttcttttttagagatagggtctctctctgttgcccaggctggagtgcagtgacatgatcgtggctcactgcagcctcaaactcctaagctcaagaaatcctcccacctcagcctcccaagtagctgagactacagacgtgtgccacctcgcccggttaacttttttttttttttttttttttaagagatggggtctccttatgttgcccaggctggtctcaaactcctgggctccagcgatcctcccacctcagcctcccaaactgctgggattacaggtgtgagccactgcagctggcccattttttacctttatatttaagcataacacagtcagttacagatccaactccttcttctcctcttttcccccttctaactactgcacttgactagttttataaataaataagtataacatatgttcaggaaaggccgcacatcacaagtgcacagctcaatgaattttcaaactgtacaaagcgtgtcactagcatcctaatccataaatgaaagtttagaccagtccctaaagagcgccttcatgaccccactctgtaaccatcttccagaagcccccaactctccttatttttttttttcagagggagagaaaggggtagagatggaatctcactatgttgcccaggctgatctcgaactcctgggctcaagcgatccccccagctccagctcagcctcccaaagtgctgggatcacaggcgtgagccactacacccggcctctcctgacttctaactccccctaccctctcctcccccagatgccccgcccccacccgaggccccgcccccaggccggccaccacctctcacccgacagcaccacctccaccaggtcgccctcctggatgtctccggacgagcgcaccagctgcaggaggttggccgacgtggggtcatgtttgaaaagcaggatcttgtcgtaaaggccgtagaagccacactcagggaactgaggggcgggagagggatgtggcgacggaaaagctcagagccgccttcagcagcgggcggactgtgaccctcccagggcagggccggctgtttcccccggaaacgcagagaccccgcaggccctcgcttcctgcctgccccctcccaaccccagcgcgagccgggcaggatgccagcgccccaattgtacggggagggggcgccggcgtgggtttggtggctggaagggggagctggggtgggagggagagtggctccgggagcgtggacacctcgaattttccggaacctggcggaggtgggaggggatgctgaatgaacactccctcccctgtgcctcctccccaggctcacacacccgccccccagcttccttcctggatctgtctattgttgtcccagttacctggctccaggcccagcactggggtggggcgagctggaaggaggacttttcggggctcctgggaaagtgggggggggggccgggggacttggactcgagggcgctggagataaggagggcgcctgccacccaatgctcaaaggacccaggtgtctgggtcctcagctttgggggcctgggggcaggaaatgaaacctagtagaacagaaagtgaaactgccccggtggggcctcgggaaggaaggtaagcggccctaacacacctggacctggcagaaaaataaaactggggtgaagcctgagcggggcaggctggggacttgagcactggacaaagaagttcacccaagggacaatctgcccccgtacccccactgccaccagcttcccatgaagtgggctgagttggggtggtgagctgggcctgcgggattgaggcatttggtgggcaaaaccctatcagttctcactgctaagagagagtccacagaagaccaggactgccttggccctgaccccttgggaagtttttctctaagcttcagtttccttgtctgtagaatgggggagctggcccagttccccacgtttctctgatgcccaaaggattcatttccaggagtctgaaaagattctggaatttggatattttgggactccaacatgctcacattatagaattatacattctagattcctacctggtatcactatacattttaggatttcaataacctaaataagcggtaatctaatattttaatattctaggagtctgacaagctaggactgtgctctttgaattctttagcattcaaggacctcatccatccagcattctaaaattctaacattttaactttctaggattcaacaatctaggaatctaatattccagcattttaatgttttactatttcacaaacctagaattctaatatttgaacacgaacatgggggcaatttaattgcctaggatgcatattccaacaagttatgattctaatattctaacatttctacagtccagtactccaacacagaagcccactattcttttaacatttcacggtttagacgtggagttccacctggtttcctcttgccataacacccagctgcccaccctggggaccctggtgtccaaaattaagagtaggctaacagcactgtgactaggaaagggaatagagtccccagggtctgtaggagtgcctgcccctccacacatatctcaggcttaggggagggcagaattgggctccgagacctcacttgcccctggcagctaactcaagcacctgcacccacacatgtcaccggatcaccatggccagcccgggttcaatttctcctgtttccaccaaatgggaggcccgggatgggcctggacgtggaggtccgccgacatctgctgccccttcctcccctctctacacctggctggcccctcccttcctccctgtttgctgcagaaaacaacgacatgcagggacatgaaatttggggaggcctctggggcaccccacccctgcccagtcctctctcaaagggatggtggggagaggggcaatggaggggggcaatgccccctatccctccatcacccaaagctcaggtctccttcctccctcttccgcacaccaggccccagacccctctgccagcgccccctccttcaacctctccccgagctggatccagggagcctgcgccctcaccttctggtccacgatggaacaggccagctgcttcacatgagccagctcggaggcggcgggcaacagcacgaactcgcgggtcagcccgatctggatgtgaaaggagaccccggaacccggggccgggatctggggcagtagcggtggcggcgactgcagctctaggccgccggggggcggaggagaccccggcccgggagagccagggagcccggcgggataagagggggcggtggccatggggggaggccggggaccggccgcctggagcccacccgggacccggccggggggccccgggggaccctgggttctagatccgcgggatctcgtgagcaggtggtgggagagcggggatccgagaaaagatctggcaggcggaggggacctgaggatggcggggtcctgggaaggagagaaaggcactatagtgggtcagaggcccggaatccagggctcccagaagatcagaaaggagaaaagtagtgggttggaggtcccagcgattgagattccaagaagcctgagaggaaatctagtaggtcggggtcacagggatcaggagagcccgcgattcaaaggccccttccctagaggagggattgagaagggggcagagggaatcccaggatccagtgctccaagaagaggatcccactcagaaggcggcccgggggaattcaccttgggggtggagggcaggagtctctgagtcggggaccgagtggattccagagataaaggggttcgcagggacccgaccggccaggggatgggcagaggggtcccgagggccggagtgggtagaagggaatctcacgagtcgcagaagttggagaaaagttcggtcgggagccgtgaggaagggggcgttgccggagcggggttgggtggggggcagggagggtcgccaggcgccagtagctctttttccccctccaaagtttaagtcggcggcggcggcggcggcccaggaggaagtgtccggagcgacagtgcagtcgaccaatcggcgcgggcctcggcgacgtcagagaggggcggagcctgccgaggggccgggggcggaaggggagggtgggcccggggcctccgagttgggggctggacctccgcctccagggtccgggacaagggatggtgtgagggatggagggcaggcaggcgagaccagttccttccctgaacacagccaagcctggaaagttaacttttccctcggctggacagggaggggaaacactatcacccaccgccggtcgcaggcgtcgggcttggaggccactggccctttaaggaggggagccctctccggcaggcgtccggcgcccatggcaggggacgggtgggaaatcggtatcaggtcccggcccgctctctgggttcggcctctctgttctccgagcgtcacccctgccctccccgccgcgtcccagcccagggaagggggtgctgcagagcgtcccccggccccagcccatttaacacatggaaagaccgaggcctccagatgggtaggaaggggctcgccttaggtctgtctccagcgatggtgggcaaggtgcatggcgctaactggatgggtggggagggtccatccccccgcccaccccaaccccgccttaggatagtgtggggctgccccgagggaggacagcacacccataccacttcatagatgcagagtgtgtctcctggggatgtggagtacgtgtgcgtgtctttctctccatgtgactttgggtgagtggcttctctgtgagcctcagtccctccatctgttgggactgtaataggactgaccccacatgggatggtgggagccgatgccatggtatactggtgcctggaaacgcagcagttcagtaagaggtggttgtctctgataatacgcggaaaggggtggccacctccagcactcaggctttgatgggtgggcacacccattcagtcacccagcaagtatctgtgaggacctactgggtgctgggtgggccctgctgtaaaactccagccgctacaggggtcaggcttgatctctcctccccagctaataatcaaatagtggctaccatttagtttacacagaataagctgaagcctcagagaagcaaaacgtcttgcccaagatcccagagtgaagttgcttgagggaagctgccccacccacccctttgattgacaagtcaaggcctaggtttgagctctaagagaagggccacctgtctggctgggatgctggcaggactggaaatggcagggctggctgaggatgggggctgccagaagagcccctcttcctggtgtacggccgttgggggtagctgaggtcggtacagtatcgattctgtcaccacatccgggggctggggctgaggaaggaagtctgaggctggagtgaaaacccaaaccaccacctggggaactgcattgagcccagagggatgggcagggagcacaccacgtggagcccacgaaggctccccttggcgtcatctaagggcctcctgcccacctgcaccctttttcctgaagggcagatgactgtcccagcaaaacgctgccatgtcctgagtgtccagacagcggcctccatcctttctcgtatgttcactggggcctgctgggggactggggcacagccctttacaacccaggaactgggcattagtgccctgtggcagaggtgctaggattaccgaggacgcctggctggtaggtggtggaagcctcctcgagacaggagcagcggtcccctccgtctcatctggagcatgtggacacctgctccctctttttaaggctgtggacccagtgaaatgccatgtaaagcactcagtacagtagacgtggaccactgagaagggaaaggagggacgcatcaggacatgagccacgagggctcgggcacctgcggcacctcctcccagcatggaggagcctgcgccccaaagccatcatcctccactggcaggtgcagccttttccctccctgctccttgtgggcctgggatgggaacaggaagggggtttacgtcctctgggcaccagccctttggcctcgccaccaccctcacacatcccaggcggggctgaggcttcagctggactgtcatcatagtatctgctccccagggctctacccctggggagggagcacttagggacagaaagggcacaaggagattcggtccagtgcctccacttctctccacccacaccccacccaagctctgggcccgtctccggcccctgctgccctaccacaaaaccccaacccatcatatcccctctctccaaactccacccaacccaggcagagccggtcactcctcccccaaagtccccagtgccctcaacagatggcaccgtcacccatcttactccaaagggtttattgagacaagttttcacatacaagatggggacagaggggttggggcttataaacaggaacctggaaggggaccgagggtgcagggtagaaccaaacaagagagtgaaataaatagagggaaagagtggagacagggaggagactgactgagaccatcacacagtgataatgcgggtggggcggcgccatgaaaatcccgttatttatacagatatacagggagttcagggggacccgaggcccactccaccctccatgccccagggaggggcacaagaaagccgtctctacccatgggcgaccccatggggcgctgggagggctgccctaggagtgttgggcaatccctggcctggaagccttggttagtgtctggaaagcagtggagagggccggaggggaggggcagccaggccggggctcagctctgaggctcccggctgccaccctttctcccagcacagctcctgcccaggtctgggaggatgggggatgggggagcaggagctcaaggggagaacctggcaccttctggagtcttggaaaaactgatccctaaagacacccggccctggctgtgctgccctctggaaagcagctctgataccaggagcggctgtcagggcacagggggaaaccccgaggccatcctcgggggtgattcctgaaaggggcccatccccaggctggatgcttggggaaggcagccgttggggagggattcctggggaaagggccgttagcaccaccaggctccatggcaaacagacagaggccaggcctctgcacctccagcgaggctgggagtcccctgcgggaaagagaagggaggggagactgagccgccgcctctagggcgcctctaaggcctcaacccctcccctgcatgcccagggctcccccagtgattctcacaggacgcccctgactggactgcggggctcagcacacctggcagtactaggcatgggcgtgcagagactcagaatgcggggtttctgccctcacctcagccccacctgcccggccctacaccccagccagcgtggcggccagggcagggccaggtgggcatcatacgaagaccttggccagggcatcagcgccagcactggcaatgagggccttgctggggtggcaggcaacagcgtggatggcctcctcgtgcttcttgcggtgggccgtgatctcctgcacgcacgttttgttgtccaggctccagagacgcagggagcagtcatggcctgcacatgtgtcggggacagaaggggtggtcactgggctcctcgctcagacgcagccctggaacccctcacctggccttgtccaaaggcctcaggggaagtggggctcaactctcctctctcaccctctgctcatcacctcctgtggcccgcccaaaggagaaccctggtcccctcctgtccacagtccatctcatcccccagcatttcttgagcagctactgcacactgagccccagggcggcaggggcagtgaacaaaacaggcaactctccctgccccgcagcactgacgctgcagctgggcaacaggaagagaaagaagaaagcaacccagccggtcagtgtgaggacagaatggccccaggaggaatgcagggagccttccaggcagaaggacaggcgggaaaggtcctgaggcaggaggtgggggtggccacaagagccttagcagggacttggggagaagaggggagaggacggcaggctgggcagggccctggcgaggagaagtttaatttagggtcaagaggatcaggcagggcaaaggctcagctccctccactgtctagtggcccccagaatagagccctgtctgggcactgggctggagctcactgaccagcccctcacccaccagaggctgccagcacaggcccggaggcagagcccagccacagcctccaacaccacggcctgcgcctctgtgcacacacactcactgctgcactcactgcaggcctcacccttcacccccacagcgacctccagtctccttctccacccacccacgtcacactccatcccttctaagcacagccacgttgctggcctcaatgcccttatccagagacaacagggtgggagcacagaagtcccacgggtacccccaggtagacctggactgatgttacagagcttcaatggccaagttacaaagcgtctgggcatcagggcccacatctgtaaactggggatcaaagtaccaaccgcacaggctgcttagaggccgaatgagacgatgcagctccagtgacccagaggagggccccagcggactgtgctgccccctatggtcaccacggtcattcccgcccagaccagcctcccccagccctggcccccggggccccctgagcacttgcctggagccagtgcccaggcctcttcctccccttctccccaaccctggtgggactagtgtgctcaacttacttcctgacatcaggaatgcgccgttggggtccacggctaggcaggtgactgcgtccaggtgtgcaaccatggagtgcaccggcttacctgaggcgagaagggcgggtggcaggttcccctcccactctgggcctcgcctgagagagtgaaaggactggacgagagactcccagagcctcccacagggacgcaagcatctctgctgcctgcctctggccctccccacccactacgagcacaaggggctaggcctcacctgtccgattgtccaggaagcggatgcccctgtcgtcgtgggcggtgatggtgagaggctggtttggatgactcaccacttggttgatctgggttggacctgaaggaaaacgcaggaagagggaaggatgtcaagcagaaaatcaggaagaccagaacagaggcacaagcgcagcgtgacagcccctacaccagcctctgcctggatgtcgaggggggctgggcgagggcactccggtccccgaccgcagcgctggttctgcacaagcagcccctgggccctgttttggggcgggggaagaggaataacaaacatgaacacattccgccactctaccaagagggcccgacggggcggccctgacgcgctctccccactcagccccgccagtgccctggctgtgagggccgggggccctccactgggacccaacttccttcctgctcagggcctgagggtgcaggggagtcatctgagctgactgacaaggggtcgccaaagccccaggaggaagtggggcccagaagacactgagaccaattccatgagctgatgtcagcccccttaccgctgctgccccgggactccagcgtgaggagggcactgccaacctccatgtcatacaagacggtgtcgccagagcggaaggaggccacgatgtgggcaggctcggtgctggtgaaggccactgaggtggggaccccgtgctctgagggcacagggaagagaaggctgctgaatggaccctcagacccagccctgccccagggtgggggacagtgggtgggaggcctggggcctcagcaggaaccactctgatagcctccagatcccgcacagctccagggtgaggcaccggggcccccactcaccgctggctgtggggaaggtgcagaggcaggccgggctgctgctgctggggtcccagatgcggacggtgccatcagcagaacaggaggccaggcgctgggaggtgggactgaaggccaggccccacacggcgtccccgtggccctccaggacgtggctcagcacgcttgggtctgcacccaccgcagggaggaaatgggctgtgtcagggctgccagctcctccctggacagcccagagccccagctctgccaagccccaggcagctgggctccaatcacccacgcacccacttcacacctggtgcccctcggaactgtccactgccaggacagcccggcagctgctcacactgcccactagctctccaaggaaggttctagggctccagaaggcagggatttccctctattcacagctgtctccccaagcagggcccagaaactgggagctcaatacagaatttttcgggctccattaaggaagaaggaacagcatggttctgtggccccaggagcggcacgcagcctgtgctggacaagggttggtcccaaccctggcccgagcagtcttttcagcccatggccaagtgcatgggctttgcctggtctctccaaagccccctggtcattcagaggtccaatcactgcttccctggttgctggagtccacaccagcagctctggcctgctgacaccgaaagtgtggtggctaatgtagctgggaccgatcctgaccttgtgcaggtgagcctgttctctaaagtctgtcctccccttgagaggagacaaagacctctgaactctgcccagacaaggtggagcacagggccaggtgcatgatcaaggaggcagagccgggcgcagtggctcatgcctgcaatcccagcactttgggaggccaaggtgggtggatcacctgaggtccggagttcaagaccagcctggtcaacgtggtgcaaccctgtctctaccaaaaatacaaaaaatagctggatatggtggtgcgtgcctgtaatcccagctactcgggaggctgaggcacgagaatcacttgaacccaggaggtagaggttgcagtaagccaagatcacgccactgcattccagcctgggtgacagagtgagactctttgtctcaaaaaaaaaaaaaaaaaaaaaaaaaaggcagagaacagggggacagatgttgaacagaagtgacagtctggtcacttccctacttaggtcttagatgctccaaagagaaagccccaacgcgctccagcctggcccagctaactccaccttctctgctttctctggacatgccctcccctcaaccacgcagagaccctggcggatccccacacacagagtacacggcatggcagagcagaggctgccagggccagccacgcctgtgcatgggctgctcccagcctgggctgcctcagcactgccttctggacgccggctcacagagattctcaggcagcttcaccacctcctcccacagccatcattcccatcccggctggctcgtcccttggccacgcgctgcatcgcgctgctcacaacagagcagacaggggagccgtcacacgcactcctgaggcctgcagtgttggcaagaggtggacgcgacgtgtgtgtgcgtggaggggacggccaggccccagtggatgtgaggggaaggcgggaggcgttgtcctcaccgtagccatcatagggatccatgctgaggtctggaatcttccaactatggatgcaggcatctgccccgccactgtagcagtattcactgttgctgcccatagccacagccaacactgggcccctggaagggacaaatatgtggaaagggggatgagacaagctcagggcctcccctggccacaggacctaagttccctactagcattcttcaaggatggccaaaaggaattcagtgactggggctctggccatgctacctggacaagctgcctgtcccctgccctcccccaccccacctccatctcctcccctgaagggctgtgctgagtaccagctgccagggcatgtgaaagtcagcatggagccccaagaaccagggctgtgtatatcatgaagggggcggggactcagagccccctgctgtcctgcctcctgccgtgggcctcccgcgatggcagtgagcaggtcaggagtcaggctgcatttaggacgagtttctagcaggctcaggggcacctccctacctgtgagcccggaaagcatgtataggttccacatctagcgccgcattcctgtgggatgacagaggagcctgatgtcactgagaccctgtcacccccgtccccagatgcccctgcccccggctctgagcttgctgccctcacttcttggccgtgaccgccttctgcaggttccagagcttgagcgtgccgtcctcggaggcggtgagcagagccgactggctgtggtggaaggccagggaacgaatgccgtcgtagtgcgagcgcagggtgaacttggggttccacgtcttcttaaaagcatctttgctgtcagacagctggggttggggggagctgcctcagtgtcttcgcatccatcccagcagtcatgcagacaccgacacccagggcttgagggcccctgtcttccacccacatgaccctggcaggaatgccctcagagcctgggctccagccgggaactctccccttcctctgctgggcagagtctccatgctcgcccaacaagtccccacactgcgctgggttctggagagacaaaggtgagcctgaccccttggggtcttgcagttgagaggaaggggaatgggggacacaactggaccatcccacaagtgtgcaggatcatcagccatgagcagggcaatgaattaaagatgcacagagagacatcaggcagcctgccctcctccctgggggccactgaggctttcctgaggaagcacgagccagcaggacttcacaagataaggagagggccctggagagggaaagggcccgtgcagaggccctgaggcagcaagggcgagcccaggcctgagaggtcagtggtacaggctgcaggaggcaaggagagtggcaggggatgagacaggtgctgggtggtgagccccggaggaatgcgcatttcatcctaagaaaaagcctcagagaaacaaggagccggggaagtgtttagagcaggggaacgacatggcttgttcctgccacccctgagaggctcagattaggggcaggtaaaagtagccacagacggggcacagtggctcacgcctgtaatcccagaactttgggaggccaaggcagaacgatcatttgaccccaggagttcgagaccagcctgggtaacatagggagatcccctcaaggagcaaaaaaaaaaaaaaaaggtagcctcagagaaagaggttgagaggccaggaagtcccaggggagatgagggcatggagaccagacacgtgaccatgaaggggaggcagtgcacaagtgggagagctgtgggggcctctgtccaccacgctgcatgcgccctggtgccgctcacccagcaggggacccggagagggccaggttccggagagatgacgagcagagtaccaggcaagcctcagcaccatgccccaagatgggctcccagctgacgtccctgccttagctgtcccttctgccacagttctttagggtcagaggatctgctactgtgtggttcactcaccccctcccctagcggggctcagaacactgcacttccccaagatgaaatgacatcttggggcgtgcagagggaccccatggcacactccacttctcaggcctctgctctgaccccccttcctgaatctcacagcagtccccacccagccttactagggtcaccaacactggaaatcccattctgtcacagtaaaatgtgcacatacacccacaccaaaagctcccagctggccaaaggctcccagctggccaaaggctcccagatggccagaggcccgtccactgaggcccggaacatttcatttcagcccagctgcccattcacactagattggcctgacttggcagagcagggggtggctacaggtcatcttcctgcattccaaatcaccagggtgggaggggcagagtggaggagccgtggaactgtgattaaaacacaggctccagagtcttccaggccctgcgccttggcgaccgcagtcaagtccctccactgtctacatctgcacccctctgtgaaacaggatgagcagggcacgggcggcacccagtcagagcttgcaggggctggccctgggcgcaatgccaatggggacagtgtggggggcacccggagaacttacatcgcagctgaggtcgttgtcgttggtgacggtgagatctgccaagtcccccaggctcacctccccgcccccgatagtgtccatgatgaagacgtctgaggagaagccaaaggaacctggtagggggaggggagggaggggcagagagggccagggagagagagaatgacagagagaggcagagaaagagataaagagcaagagagagagacggggagaggacaagatgaagaatcacagctggaaagagacagagagacagacagggcaggacagacaaaaagagagggagacagacagacagacgaacttttggggcagggaggctgcagactggaggctgggcctcgaccctgaagacacagaagccctgggctcagctctgcagcctccctctgccatgggcccgcaggactgggaccaggtggggggtgcctcttaccttcatgtggccggggctggggtgtgccaggaggcgggccagtcacttttgggggcagcccatccacatcccgcaggtcagccagaatgccttggagtttgacccgacggctttctgcagggtcgaggcatagggccggagtcacccagcagttccaacccagtctggcataggtgacgccttccccacactgagggccccctgccactctgtggggctgtgaagctctggccctgggggagggggggaatgggcagaggagaggaggttgattgggcccctccgtggggcagtgggcaggtcactgccttgcctaggcctcaggccccagccacccatcccacgtatcctgagagccctcctagctaggagtcacaggacagggaggaagatgcggccctcccacctgcctctccccgactgggtcctcatcctgttccctccttgaggccagccagagctggacgcccgccctggagggctggcggccccacttcaggaagagccaggactgcctgcgtctccatggggattttccagggaaggggtgaggggccggcggccatgacctgggcctcctgctctccttggctaccctcctctcaggaaacatatccgtccggtagagagaccctgtacaggaagcagctgcgggcagctgagcctgctcccaccccctcggtggggaaggcaagcgggggctggccagaaaacgtcagctcacccagctcatgggggctcccatccacagtgcaccgccgagggtctggagccccttccccatcctctcctgagcccaggaaatcaaactcattgatagcatcctcagagtcgtcttcctcatcctcgtcttccatttcgggcaccagagccttggatgggagctggcacatggagaaagccagacaagtcagggggcctcttgtccagagactaagccacctccgtgcctaggaacaggtaagccggggctctgggcccgtttctgttcatggggctgcctcagccgccagccagctgccctggagcgccccctgctgggccttggacagctgctaccactagggccggtcggcctgaccccaccctcacgcagtccttcccctagccagggctcagcctgctccagtcccccagcaaggtgcctcggatgaagaaaagtcagataatgcaacaatctgcctgcagggagggcagatatgcactggtgtccgtgtgtgaatatacggaggtgcaaacaagtgaggatgaatggaccacagcattgcagcgataaacacagcaccagcagccgtgctggcacaagagcaaattccactcactgaatgaccactgactacccctcgcagacacgacttcacttaacccccaaccctgcgaacagctaccgtgaacactgtcattatcattcccacattacaggccaggagacaggctgagcagcaggaacccacttgccctaggtcaccaaggccaagctctgcccactgtgaactcctccagggcgtggctgaccccttccacatgtcagccccccaggctgagtttggcgacacctctcgggcaccagtgaggggccagcctctgacctgcatgggggggaccagagggaaggggcatggagaagacctagggccaaggtttattcaacacttgtgcaaagaatggggaaggggagggtttagacagcatgcccagaaaggcagcggccgggctcaggactccagaggagagaaccaccacaggtgctctgaggggcacacgagtggcaattgtgctctgccaacagtgcctggaaccatgagggctccaccactaccaagtgccaccagcgccactaacacctactgagcacttgggggacagccaccatgcagctgagggcttcctgggcaccagctcattctaattaaatcctcaacaactcagacggagggactcagccccatctaaagggtgaggagactgaagccaagacaaagaagtgtgggccagaactcacgcagctgggccagggccccctgggagccatgggcagtcccctgggttcccagctgggcctcgatggagggctgctgcgtagagacagagagccctacccaaccagccagcccaagggtgtgggcccgaaggggtgcaaacaccacggatgattcctgatggaatgggtggaggggtggaaaaggactagaaattctcagaggggtgggaaggaccaagcgtctggaccaggggccagcatttgagaccctggactcagccctcctgctcttcctctaggcctcctgcagtgctgcggctccgtgcacaccactctacttggggtgcgactctgtgctgagccacactggggatactggagatgcagtggaggcccacacaggcccagtccctcccagggagaggtcaggaggaatacagaccagacagggaggaccccagagtggccagggccagggaagggagcccagggtgagtcagagaaggcttcctggaggagggggtgtctgagctgagtctaaaggaggaaagaaaggggacctaggcaaagggacccgctaatgggaagcccggggctcagggaaagctccgaggccatctgccacaggtgcctccttcataggcacatgcccctgcctccaccacaacgcgtccttctgcacatgactatttacaaggccgctgctggccacaagctcctccaggccagggcctgtgtgtctccatatccctgctgccagcacacaccgcagcccctgaaggcccaggctgactcggaagggcttcgatcaggtcacacccaggccaggctgtgcagggcatggaggaagggctcaccttcacacgctgcttcttgtgctgcacgctgtccagctcatcgtcctcgtcgctgtcttcgtcctcgcagttctgcaggaaggggatctgccccagcactgagccgcccaagcgctctttgccatctttgcctgccgcgttcctgccaaagacagcagagcagaggaggcatgagtcctggcaggtgtcaaagctcagataggaaggtgccctcccaggcttggtggccagagcccagacccagctaaccccctaacccctgagcagccttgactctggtcacacacagagccccaaccccagcctctgcccaacaaatgctcattccaactggaagcctcactcagaccgcaaacggggcccagctcctcaatgaccgccgacctgagtttcagagggccagcccccaaccctggtcacaaatctccatcctgtgctgagtcagaaggaaagctggatgagaaagtgccactgactcagcagtccccattcccacagcccagtcagaccacaagggcaggtcaggcaggaggcaaacacgccctgcaggaaagaggaaccggccattctacaaatgctctgggaggcgccgaaagccagccagcctcgcgcaagcaggggcgccggcgatccctgctacccaggagcctgcactatccccagcaacagatggcactcctccttccacctcctggcttccaacttcatgacaagttatagcagaggaggtactgacccagcctgactgcgggagaaggcagggtgcaattccaagtgcagatcgacgaaaacgtcccccctttctgccatcaggttgatgccctggaggtcttgtcaactgccagttaccaacgggtgcagaggtcactgcagatgtaccctctcgcctcacggctgccatcaccagagctccactccatcctcagaacactcgctgcacttgcagcgggacacaggactccattctcaccggccttcctcccacaacgacactgacacgccgcacaggctcagcctctttctcagcttcctcctcctgttcctccctccagcctctaagtgggagagcacccgggcagtccccagatctcttctctgcgtcatctacactcactcctgcaggcactgcagacggccatggctttccaaagaatgcccatgtgcttgttcaactagacctatgtttaggggccaaatgccccgcagctccagacgagctctgcttctccacatgggggtaaacaggcccctcacacttcacacaacctcggcggcccccagaacttccactcccaggcttccccgtctcaggggatgctgctccaatggctcacaccaaaccctggagtcgctcgtttcttttcctctccccttagctgcagtccttcagtgtcgactgcctgaaagcctctggggaagctgacacctctcgcctcaccaccgctaaagtccatcagctctgtcccagacatcgagccatctcctaactggtccgcctgcctcctctgtgaccctcccacacctctccttctcagagtggatcaggtacgtcagattatgtcaccccgctgctcgaaagcactggcttcccacaaccctgagtcaaactcagactctatcccagcccaaggccctgagtggctgactcctgagaccacaacctccccgcagcccacgcctcactgcctgcggccatgccggcctcgtgctgcttctgtgcaggctgcgtctctcctgcctctggacctcggggttcactgtgccctctgcctagaacattctcctcccagccactcgtgtggcttaccctccatttaatgcccacagaggccctccctgcccaccccctgcagaggagcacatattggccctcgtggtctccatcgtgcttagcatcacctacgtggcctcacttgttctgcttaactgacaattgctgatgagagtgaacaagccagagattcctgagggtggcgaccacgtgtgctccactccctgctggcgaggcacccagggtgtgccttcggtaagcaccccactcgaccgagaagcgggcaggcctgagtatcaggacgggggcagggctggagatgaggccatggcgaagtgtgtggagggaacccaggacagaatccgggggatcccagcagtgaagggactcagggtttcagaacaagggagcccacggcatactccaggaggaggggccgccagggcacccagcgccatcagctgacactctgaccctggccttcaccagcagtcaggaggaacagagagacacacctgccatgtccacgggctcacctctttatctgctcctcgatctgtttcaccagcagcgactccccaccactgagccctgcagggcctggtggagccctgggggccccttcactcggctccactgccccgttgagctccagcgagcggcccagcagggaacggacgcgcttggaccgcatgtcgaggatggtgtctgtgtagcccacctcttccaggtacctgcaggggtgcagagccacgtgggtcagacatcccctgggcttcttcatgtaccacaggggccaatgcaaaccgagacaacctcttaaggggccacttaagagcatacaccaaaatctgacataagcacaccctcgctccagcagttccccgtcaaggctatttccagtggaagcccttgtacacacacacaatgctatgtgtgagggtgctccctgcactgctgtatggggaagccgaagcacagggaccagcctcagcacccaccgacaggggctgtgtcagcaaatgactcatagcgctgcaaggcagaagatcaacagggcagagccttaagggaagctggccacggtaaacagcagaacgaaaacgctaagttctatgatccacatgatgccaatgtttgtagaaaaaaacaaaaaggcgttaatgtgcataaagcttacaccacacgcaaacacacgtttgtattatgtcccccaagaggcctagaaagatccataaaaaacataacagcagtgacctctggagaatgggattaggggcgtaagaggaacttttgcaacttactctacttacttctacaaatgagcacttattacttctgcaatttaaaaactgaagccagctgggactggactaaaagtaaaaaaagaagaaggaaaaaagaacaaaaatcaatttggggtatctgtggcttcaaaatacagcgacaacagtcccttgctactcctcaggaggcttcctggccaggccgcctttgccgttccctgtcccttcgcagctctgaccctgtctcttgaatgttaggctgcacgcacctgcatgtacgtctcatcctgtgcgcctgtgtgtgtctgaggctcctatctccccaccaaaagagagacagggaagcacggggctttaaagctgggcactgggggcagattgcccaagatcccacaaattaaccatgcaaccttgtgtaaacagatcacctcaccgcatgccagttttcttatgaggggaacactagcattataccacacagagatctcagtgaggagccaacaggtggaaaatgtttagcacagtgccaggcacgtaataggtacttggtaagtgtagcctgttagtattactattattgttttagggttattgtttgcacacactttaagctagcaaccccacttccagatatctaacttgaggaaatcaaggatatgcacaaataccttcctgatttttatcacactgtctataatacaaaaaaattaaaagcaaccttgacaaaatacaaggaactgaccatggagagttatggttatctatatgacagacattatatgttgggtttttttcctccataggaccaaaggaaggaaattatgaggtcttcaaagtgatgcaacataactaattaatatggagagatgttcgtaactcttttttgttgttgttaagacagactcttgctctgtcgcccaggctggagtgcagtggcacgatctcggctcactgcaagctccgtctcccgggttcacgccattctcctgcctcagcctcccgagtagctgggactacaggcacccgccaccaagcccggctaattttttgtatttttagtagagacggggttttgccgtgttagccaggatggtctcgatctcctgaccttgtgatctgcccgcctcggcctcccaaagtgctgggattacaggcatgagctactgcacccggccgatgtttgcaactctttaacagtgaaaacaaatcccagcttttataaaatatataagctgggctgggcgcggtggctcacacctgtaatcccagcagtttgggaggccaaggcaggtggatcacttgagctcgggtgttcaagaccagcttggccaacatggtaaaacgctgtctttactaaaaatacaaaaattagccaggtgtggtggcacacacctgtaatcccagctacttgggaggctgaagcacgagaatcacttgaacccgggaggcagaggttgcagtgagccgagattatgccactgcactccactctgggtgaaagagcaagactctgtctcaaaacattaaaaaataaataaataaataagtaaatgaaatacataaactgagcagtgtggctcatgcctgttgtcccagctactcaggaggctgaggcaggagatcacttgagctcagatcaagcctgctgtgggctctgactgcaccactgtactccagcctgggagacagagtgagtttatttatttattaagataacagaggcaaaaatacacagccacggaagaaactgagaccatatatggcaaaatgtttataggggtatgaaatttcttgggtggagaaattatgagtgatttttctctctgctctcctatattttctaagttttctaaaatgcacaaatctcttcagcaattaaaaaataataatttgaggctgggcgcggtggctcacacctataatcccagcactttgggaggccaaggcaggcggatcacctgaggtcaggagttcaagaccagcatggccaacatggtgaaaccctgtctttactaaaaatacaaaattagctaggcatggtggtgcacgcctgtaatcccagctactagggaggctgaggcaggagaatcgcttgaacccgggaggcagaggttgcagtgagccgagatcgcaccactgcactccagcctgggcaacaagagcgaaactctgtctcaaataataataataatgataataatttggccaggcgcagtggctcatgcctgtaatcccagcactttgggaggccgaggcaggcggatcacttgagctcaggagtttgagaccagcctggccaacatgctgaaaccccatctctactaaaaaatacaaaaattagccgggtgtgatggcacctgcctgtaatcccagctactcagaaggctgaggcaggagaatcgtctgaggtggatggaggcagaggttgcagtgagctgagatcgtgccactgcactgcagcctgggcaacggagcagaaactgtctcaaaaaataataataaataataataacattaagaatttgctggtccaaacatggtgagttactgtgatgattcacagttgattacagacctacttacagatctgccttctccccacttcccactactgtatttgattagtctttaaataaataattaacaaataaaaaataatttaatattacccttgggaaataaaaagccatgcttcataaatcttcacaaggtatctaaaaaaaaaaaaaaaaaagccacacagggctcctatggccactgagacaaaaaaaaaaaaaaaaaaaaaagccacagaggcattcagggacacattccaacaggggtgtccccacgtctgcctcctgcagcgggtttccctccctctccccaggccaggctccgcccacagggtgaaagccattccagccatggctggctaagatcctgatagttcagcatccccagtggggacggaaaaggactgtggagtctttggacttatctctcaagccaaacgtgtcacgtgtccccagcccccctccccgagcacactcactgtcggagaagctgccgcccctccttccacaccaacgggctgttctccagggtgaccgattccacggggccattggagactggcgggtgagagaacggaggctgtcttaagtcaggccactgccacctacccatcacctcctccatcttcctcacccctccaacccaaatcggtcactgtcgcaggtcctgtggcatcacttcctgagtgttggaaccctgctctcttcccttactcggggattcctcctccttgaagcgttcctcatctctaggtctcctgactggtggttccccaaactggcccccgacaagataagggtgttatctcaaaaccagaaagctggcctggttctgagagaagggccgactgggttcaagcccagctctgccccatcccagctgtgtgaccctgagttagtgtaagccgtgtcagtttcgtcctctgagaaatgagcttaatgataacagcatctccctcttgggagtgctgagaggatgcaatgagataatttgcttagtattttattcaagtctttcctgggcatctacgctgtgcctggccaggggcctgggctacatgggtaaacaaagacctgcccttgtggaacttccgttctagtgagaggagctggcagcaggtaatgaccatcactatcagctgagcacacaaggtcttctcagcttgcctcggccaagcttccccctcacccagcccgccctcccacatcctctgccctacactgtttgcccaggcacactgaccgactccctgtcccctaaccctttcagcgtgcgtctctgtatctgtgctctctcccctgactctcctgctggggaacggagtcatctttcaaggagcttagactctaagggaccagagggtagagaccatgtctcccgtgctctctgctgtattcctgatctgtgatacaaagcctgtaccctacaaataaagtcttttttggatgaacgattgaacggcaaccctgttcaaacgccacctcctcagtgacgtcttccccggctttcccgcaccgtccccagcactctataaatagccctggcgcccactcctcgcaaagggatcccgtgagctgctcgtgtgtctgcctctgttgcacagggggacccaagcgggactggcccccagggtccagcacgggacctggcagcccatagggagggctctgagagtgagattccgcccctccccagccccggggccgattctgccttctaaggagcaaagtgagaaagaggcaccccatcttcctgcttctccagaacactcagcttctgcgggagggtgccgacagtgcgagcatcagagggtgggtaccttgttctgacacatctgctttcttctccccctggttcaggtctgtcccaaacttcagtttatgatatttggccctaaaagagcaaatgattaatgaataagagatgcgggagagtagacagggtcagtagttacctaaggaatccagaatcccaaaccccaaatcacagggcctcccccagctcgtctactactgaggctgaagcatccccccacacccctggcctggtggaagaaaccactccctggagtcaggcaacctaggttgctctcaggggtccttgaggaaaccatcagcccttgaaaccccagttccttatctgaaacagggctaacaatacccgttaggctattggaaggtataagggataacggaggtaaggactatacgatatttggcgcacagtgggccactagcatcgtgaatatcgttcctggtgtctaacccaaatcccacctactctgtcctgtttctcccctagaatcttatggtactggaatgatggaaaagaatgtcgaccccaaatctcccttagctggaaggaggcgtggctggtggcctcctgacactgtgcttgagacggacccagaaggcaggcccagggcaggatgaaggctcacctttcctgcttcagcgcatactctagcatcttgatccgccgcaccaggtccgtctttagattctcctgccctttcctctctccctgaaggaaggccacctgagcctgggagggcagacaggaggcaaagggagataatggggctcaggctcaatgccggtgtgtctatcactcacccaggtatagtgccagcccacagtcaccccacagtaatgggcagcagccacttcctcaggcacaaagatcccaagccagggttcagggagcactgagaggacaggatggatctgtttccagggccccctgccacgtcacccacaacgagggccgaaggggagcccttaacccctgagataacaatggggccagcctgggcctcacctggtggctgcctttggggggaagtcgggtcagggatggcagtggagaggagggtgggcattcaccgccctggactacccctgacgccctctggcaggtgctgtccctaaggctgctggtggaggtggcgtcccactattcttaccagagcatctgtctctgggaggcgtgggaagctacttctggagcttagggacaagagtgggtggctcggctcggctcctgctccaatagaaaagctttacaagccaagcccgctgtggggaccagccgtcccactgcattccgcccagggtgtgagagaaatgtgccacagacacgaccccgggttcctgccaagcacttcacaccgtctgctggcttgagctgccccgtctgctccagtctgtcaacaggtcatttggagacactgggcccactgccttccaggcaggatcctggcccctgaccatggtccagaagctcttctgccaaagccctggcccaaggctcatctctggcttctccccaagcaccccaccgttccagcccagaacagccagagcccaggcccaacttagacacttactcgctacatgatcttacgcaggtcatcagccttctctgagcctccatttgcccctctagaaaatgagagtcacaagagtgccctcccctcatgtgctaggttctgctcagtcaaggcctggcacagaataaaggctaacaaatgccagcttctacttctttcatcatttttattctccctgtccattgttcgcaacttcgaaatgggcccagttccttacgggaggtaggatcccttggagaccccagatcaactagaaatgtctgtggattggccaggcacagtggctcacgcctgtaatcccagccctttgggaggctgaggtgggcagatgacttgaggtcaggagttcaagaccagcctggccaacatggtgaaaccccatctctactaaaaatacaaaaaacttagccaggcatggtggtacacacctgtagtcccagctactcgggaggctgaggcaggagaatcgcttgaacctgggaagtggagattgcagtgggccaagatcgtgccactgcactccagcctgggcgacagagccagacttcgtctcaaaaaaaaaaagaaatacatgtcaccagttaccttatagaaaagaaaactcatctgtccgcttcaagaatgggaaatttttttcctttttaacactttttaccaacacatatgtatataaacatccaaggccagacagggaaactacttatatgacatcagcatctctgaagcatgagtttctgtcctttgtgtatcttctcagtcccccaaatctactctctgaatcactggagaaggtgtgaggagaggcagaccgaccaccgaagacaagtcctgactttcctcctcactctcctcccttccctcctggggtttggtgattgatccctcaacctcccaggggcagttcagcctgccgggaacctacaccttggtcaatacctgccactgtttggtgactgcccacacacatcaggtgccccagtaaggcgctggggaataacagaggagccatgtggttcctgcacccacagggctcagtcccatgcaggagacaggcatgagcagcaactcacatgcaatgtgactaggaccccattgcgggagcgaaggacgctatgggaagagggacaagaggcgacaattcagctaaggcctgaagctgaagagaagttagccaggggagggaagggccctgctggcagaggacggagacaagagctgcatggtgggcttaaggaactctaaaaaaggccaggatggctgcttcagaacctgtaaaaggctcagtgaagccatggaagggttttaagtacagagaggtaaccgattcgcatgttataaaggcagctccagctaaaacatggagaactgactggagggagttctggagggagactagagggagggagcaggagagcggcagagctggacacagagacccccatcacagatgagggcagtcccagaaatcccaggacagaacggtagtggcttggactaggccggggcagtggacacagtagtggtctatctgtgggggcaggaggtggagttgggcatcccaaccagacctgtcactggctgggttcccccttcatccctctgctgcctcatcgagctgtggtctccctcctcctaatgaggatgtgagggtctcagctgcccactctgctttgctgtccctttcccagtgcctctggaaagagaaccagaaagacatggttggagcatctcagggaggtggaaacccaccaaaaacgggaagcgtcagtggccagtctctccctcgctgcaaacgccagcagcccccacgggctgtctggtctgcgagggccaaggtaggcctgagggtcggtcggggatctggaagtgccgctcaccatatccacccactgccactccctctagccagagccgcagagcatgcgctcccaaaaccttctgatacctggcagctactgcctctccgcccctccagctattcccagcaaggcgacatctaaaggcttcggaggagtcccagcaattcagtcctcccaggagctgatgcctctctgaattcgctgcttcctgtcccagctagctgggaagagtccccgtttcgtgccatctagccctgcatctcctaagggcctccttcccaagcttcagcagctgctggcaggaatgggcccccaggaagctgaagtgggcaggggcagctccgcacattctctgctggcaccgcactcactgcaggtccctgtcgctgctcctatacaaatctccagttcagatccctcattaaaaggtccctcccatcctcaaaaagcttcccctctcagagttgccacagaacaggggcagagccacacaatcaactgtgcatgaacatctacagctctgcggtcccctgcacaaacaagcttcctctgccagcctggaagtttcggatgggcagaaaccacgttacttacttctcagaatcccccacctagcaaatgcctgctcattatcagactgcagctccgccaccttcctgctccaaacttatggtgactactggcaggacctccctgggggctgccttctctgccattcaacacacaggtaccaagcagggtcgcacggcaggtcttctgctaggagcagctgtattaagctcttcagagaaaagttattcagagtccatcaggaaaatctgacactgcctagctcttaagggatctcacaggggaagtcacaccgtctgttagcactaagtgttcaagtaaaggtgtgtaaaagaggtgccgctgatgggagagtaaactggtgggtcaatgtggcagagtcattcactgtttctttttttatttttattttttttgagatggcatctcgctctgtcaccaaggctggagtgcagtggtgtgatctcggctcactgcaacttctgcttcccgggtacaagcgattctcctgcctcagcctcccgagtagctgggactacaggcgcccaccaccacgcccgactaatttctgtatttttagtagaggtggggtttcaccatatcggccacgctggtcttgaactccagaccttgtgatccacctgccttggcctctcaaagtgctgggattacaggcgcgagccaccgcgcccagcccaatcactgtttcataaacacatccattctactattccactcatctgttctgcttcattcttgcacaggaataaggggttctcactgcagccatgtctgatgggggaaaaactagaaaaaatctaaaagtccaccaaccagggtcaaactcaatcagctatggtgcaaacatcccgtgggacgctatgcagctatcaaaaagaaagagttctctgtgctgatatgaaaggaaaaccaaaacagattattatgtcacaaaatgatacatacagcagtagttcatctattacataagcacaataactcttctctctcaggagagaagagcaggaaagggacgaagagaaggaactttcctttttcacttacatatatatgtgtatacacacactcacacacacacacacacccctctgagatgtctgaatttttactaacttaacagaataaaagaaaacaaaagtacaaagtgacagtgctggtaccatgccagacacaagttcctctcaaactccaagaagggtcagtaagtgaggggataaacatcttttctctcatcagcctccaggatgagaagatggtgtggtgggtgctgtgcggtgcactggtgcaaagtcccagaggccaagattcagtccaagctctgctatgactgcttgggtgaccctggggaggccactatgcttgcctgaaccaattttctcaactgtactgggtagcagagaggtacagaacatgggcttaaaagtctaccgacggtcgggcatggtggcttatgcctgtaatcccagcactttgggaggccgaggcaggtggatctcttgaggccaggagttcgaaaccagcctgaccaacgtggcaaaaccccatctctactaaaaatacaaaaatcagccaggcgtggtggtggtgcacacctgtaatcccagctacttgcgaggctgaggcaggagaatcgcttgaacctgggaggcagtggttgcaatgagccaagatcatgccactgcactccaccctgggtgacagagtgagactctgtctcaaaaaaataaaaataaaaataaataaataaataaataaataaacaaaaggtccaccacagaccagcccttctgctcatctgctgggatcctagataaatcaccctctcaaaacctccatttcctctcctgattttttttaaaggtagggggaatatcctttatcctcccagaatgctgcaagaattaaatgacagctcgtatctacagtacttgatacagcgccccagacatggtatgtgctcactaaattgcagctggtaccgttattgctgagtgaggtaatgacactgcctctgcctacatcacagggcattgtgaagatctgatgagatgtatgctgggaaagagcttcggaagtagagagtgggacagaagtgagagcagttacataaggattctgctcccatcccagccccaagcctcagccaccacaagtgagggcagggggagagttactggagggtctttactcatcctatgaacaaaatgcttttttttgagacaggatctcactcttttgcccaggctggagtgcagtggtgcaatcatggctcaccgcagcctcaacctccggggtttaagcaatcctcccacctcagcctcctgagtagctgggactacaggcgcatgtcaccacacccggctaatttttgtacttttttgtagagatgaggtcttgctatgttggccaggctggcctcgaactcctgggctcaagggattctcccacctcaacctccccaagtgttgggattacaggcgtgagccaccgcaccccatccctaccgacacaattctcatcagctatttatttgggtaccagcttcctactagatagcaaacggcaaatcggaaggggaaaggtgggctgctacaagcaggtaatgacaatttctgctaataataacccagtccaagaatcttcagacttccagcgggccattcctgatcccttcaaatccggacatctccatggtcctccagtcactgccaatggacctgacgctccacgaggtcacaaaccctagcccaactcctcagactcttccattcaacatccctgtcccaagctaccccaaaaaccacggggtcttttcccaagacttccacaaacatatccccttccccccaaccccagtctacccccgttccgagatgcctcctcatgttgccttcgggctctacaaaattctcccccctaaagcatcaccccagggtaacccctaactcgtcctcattggcaccatcccaggaccctcacctccatactggacatgcccaacaccccacactccagttcagggctctctacctacatcctacaacacacgtgccatctcagtgccatcgcgcccactcctgcacacccccaaagtggaacttccactcttaagctctcccatccaggctcctagggtacattccctgctctgtccacacttccactccaaagaacccttccctgcactgtgcagccacacatgcccgggatccccaaagtttctcctcagaggggaaggcacacaccttcatcctggaccccttgaaaccctcctcccacccctcgggtccttacacagccctccttccgtgcccaccgtccagtcgccccgaaacacaccgatcccaggttcccgacttcctctccctaaatcctcccggttccccatctggacccgctctttcccagcgggtcccaagttccccccttggacgctcccacctccaacctgcacctggctagggccatggtcggggtcggggtcgggagtccctcggcgcccggcaagcttctgcttactcccacaggagaccactcaggtctcccagacccctccagctcctctccacaccctttcccgagttctcttagcctcccctccagggctcgagtcgcctctctcaggagccccgcggccagcgtgctcagtcccagtcccagtcccactcccagctggttgtggtccctccgcccctttctctcggccggtcccggtgatccctcccacccccggtccctccactcccacctcgggccgtcccggtcccgtcccaccccggagtgccctcaggacacccctcggacggcccctcactcgccctccgggaccgtcgcggtcccctcccgcccccccgccggccgtcccggcggccattgctccaagatggcggcggcggcggcagcgggtgaggccgggccgggccgggccgggttgggggtcgggggtcccgggacagcgctcacctgtaactcggcgcgctcggcctcccagcgggctttctcggcttcgaagcgcgcccactcgtgctggataaagtgcaggatccccggcaggctcaggggctccgggcccgccgtgggcccggggctgcctccgccgccgcctcccttacctgccgggcccggcccgggggcaggggcggagaccggggccgccccagtggggccagggcccgcgcctgagccgagcggacggcaggaggaggcggcggcggcgaccgcggcggccgctcgctcctccatcatggaggccccggggccggcctgcgcgcccgctgtgcctcgcgcgcctgcgcggccgcgccaacacccccccccctcccccgccgcaaccaccgcgcgcgcgcccggcgggggacagtaggaaggggggccggcggcgagcgcgagcctcgcccacccgggtctacaccgaagggtagcgtgcccgcgcgggggccggcgggtgggagatcgcgccccgaggagggcgagggagacccaggccccgcgcgacggtccccctcgctggagtgagactgaggaaggggccgctttctgcccccctcctcccacttcgccccagagaaagagccttaccccttccacacccaaacaccactctcctggacaattacttttactctgagagaaagggcgaccagcagtggccccatcctctctgattgccggccaggttggttgtcatggtaacccttccccagcggtgggggcgaggtggtggggagcagccttcccctcgcttccacctttgtggttatggagccccaaacctcttaggactctgcaccaggagaaggttgctaaggtaacctaagtgtccgtggtggtccttctgctcctatcctcattgattactatggcaacctcccccccacctagcattcaggtagaaaggaccccagccccaaggacactgatctctaagagaagcacctcttccccagcccctcccccatagccacctagttggcattaccatggtaaccgtcttccccttcccatcgtgggaggcccatgcaccaaactaaccaggtgtttttatttagaggagatgctctgctgaggggcagttgctatggttacagggcctggaccttcctccggaaggtgagaaacaggcaagttcaaggcctggttactatgataatagagcagcccccttcgagtgaccctaggaaccaagcccaacaaaggaggggatttttttttttttttttttttttgagacagagtgtaactcttgttgcccaggctgggatgcaatggcccaatctcggctcaccacaacctccgcctccccggttcaagccgttctcctgcctcaccctcccaagtagctgggattacaggcatgcgccaccacgcccggctaattttttttttatttttagtaaagacggggtttctccatgttggtcacgctggtcttgaactcccgacctcaggtgatctgcctcaggcccgcctcggcctcccaaagtgctgggattacaggtgtgagccatcacgcccggccaggggatgttttaagaatgtctctcagaggtagagtgtgtctatggaaggggttgtcatggtaacagcttctgttggcttctagccctaccttttctggacacattcatgctagagggatggttataggttgctataataactgacatccctcccattcaccccaccccactcctgagacaccccaggtggtgcccgagattataggacttcaagagaaaggattccctgacctttctcttgccacttttgtggataagatgaaattgtgctctattgtacggaaatggctgatttgggattttctggttctcctcctctcaggagcgcagctcagctgggctggaactgccctcctggaactcccccagcctacaacctaggaggtaagaagtccctcagtgtcacctacactctcatggaaactgcccttcctcattccttaaggctttcccatgtctctcatttttttctttttctttctttcttttttgagacggagtgtcgctctgttgcccgggctgaaatgcagtggcgcggtcatggctcactgcaacctccacctccctggttcaagcgattctcctgcctcagcctcccgagtagctgggattacaggcacctgccaccacgcccggctaattttttgtatttttaatagagatggggtttcaccttgttggcaggctggtctcgaacttctgacctcgtgatccgcccgcctcggcctcccagaatgctagaattacaggcgtgagccaccgcgcccagccctctcatttttttctaaccgtcacattcccattccacaggtgcagggactgaggctcaggccaaatcgcaactcagacccagtgaacccaaggcctgaagagaatttggattcatttaccttgttttgtggggactggagagacaagtaaactctcagagtaactgtcccctctgactaccatttctaaggcaagccccctgtttctactcttgcgccccctgctggtttcctgccctgtctgtaagttgcatggcttttgtccgtcttttttttgtttgtttgtttgttttgagacagggtctcacccaggctagagtgaagtggagcaatctcggctcactgcaacctccgcctcctgagttcaagtgattctcacacctcagcctccccaatagctgggattacaggtgcgcaccaccatgcccagctaatctttgtattttttggtagagagggggtttcaccatattgcccacgctggtctctaactcctgacctcaggtgatctgaccgcctgggcctcccaaagtactgagattacaggtgtgagccaccacacgtggccctgtcagtcttctttctgtcttctggagggctgacctaatgagtacctcgttcattctgtatcctcaaaacatggggtccaccacaaagaatacttgagtttgttgagttactgagttgaattaatttattaatgtgccatagccaagctttgaaagcccctgtcaggttagggctggggaaggctcactaaagatgggctgagagttggggcttcagaaagaacccaagagagaaggtaaagtttactggtttaaagtacgactctgtagccagcttcttggatcaactcttgggtccactacttcacattgtgtgaccttgaataagagactttaactctttaactctctgtgcctttgtttcctttttttttttttttttttttgagataaggtctcgaggccaggcgcggtggctcacgcctgtaatcccagcactttgggaggctgaggcgggcggatcacgaggtcaggagattgagaccatcctggccaacatagtgaaaccccatctctactaaaaatacaaaaattagccgggcatggtggcgcatgcctgtaatcccagctactcaggaggcggaggcaggggaatcccttgaaccagggagttggaggttgcagcgagccgagattgtgccacagcactctagcctggtgacaaagcgagactccgtctcaaaaaaaaaaaaaaaaaagagtctggctctgtcacccaggctggagtgcagtggcacaatctcaactcactgcaacctctgcctcctagactcaagtaatcctaccacttcagccaccagagtagctgggactacaggtgcacaccaccatgcccggctaattttttaaatttttttgtagagacggggtcttaccagtccatgctggtctcaaactcccaggctcaagcaatctcccccagcctcatcctcccaaagtgctgggattacaggcatgagccaccacatcggctggtttccatttttaaatgtgatcataacacgaggattaaacaagtgaatatgcctaaagtgcttagaacagggcctggcacatggtgagctgctagaattgttattattatcctcccgattcagaaaaatgtagaacattcagaccttcaaaatcatcattgtatccactttgccccaacgaaggggtttgttgcccttagaggcggtgaagtctgcatggctttatcagggtactagatgattcctttccccgcctcaggttccctcacaccctcaccagcaggtggcacctcttcatctggccatcaaatctgctggtgtctggtctgcgagggccaagagttgtgctgggcctgagggtagccaggacctggctgctgtcctctgccctgctgggcacctccttcctggcccagagtcagtcagacagtgtggcaagagccagggcctcagaagcggagacctcggttctcgaccctgcatccttcttatctctctgagccagaggttcctatctttcgtttttgagactgggtctcgctctgtcgcccaggctggagtgcagtggctgaatcacagctcactgcagcctccacctcctgggctcaagggaccctcctgcctcagcctccctcctaagtagctgagaccacaggtaggcaccaccacgcctggctgatttttgtatttttttagagacggggttttgctatattgcccaggctggtgttgaactcctgagctcaagcgatcctcctgcctcagcttcccatagtgctaggattacaggagtgagcccccatacccagcccacgttccttatcttaataattcaagtcactcattcattcaacacgtatttattgagcacctgctatgcaccaagcactgagctgtgctctggggatacagtagggaagaaaacagattccctgccttccatggagattctgacaacaaacaagctaagtaaaatccacgtgataactactaggggagcaaaataaagcaggaatgggggataggaagtacatgggagatgctttttttttttttttaaagacagacaaggtctcgctctattgcccaggctggagtgcagtggcgccatcacagctcactgcacccttgacttccccagctcaagtgatcctcctacctcagcctcctaagtaactgggactacaggtgcaagccatcacatccagttagttttgtttattttttgtagagatggcatcttactatgttgtccaggctgatctgaaactcctggtctcaagcgatctgcctacctcaatctcccaaagtgctggaattacaggtgtgagccactgcacctggccaagatgcatttttttgtttatttacttattttgagacagagttttgttgttgttgcccaggctggagtacaatggcatggtctcagctcactgcagcctctgcctcctgggttcaagcaattctcctgcctcagcctcccaagtagctgggattacaggcgcctgtcaccatgcccagctaacttttttgtatttttttttttttttttttttgagacggagtcttgctctgtcgcccaggccggactgcggactgcagtggcacaatctcggctcactgcaagctccgcttcccgggttcacgccattctcctgcctcagcctcccgagtagctgggactacaggcgcccgccaccgcgcctggctaattttttgtatttttagtagagatggggtttcaccatgttggccaggctggtcttgaactcctgacctcaggcgatctgcccacctcgccctcccaaagtgctgggattacaggcatgagccaccatgcccagcccaccaagatgcatttttaaataggatggccaaaggaagaggttatgggaaggtgacattggagtgatgggggtgggggccggcgcagtggggtggatcgcctgtggctatctgggataagaacactcagacagaggcaacaggcagttctgcagctggagtgtcccaggtgtgtttgaaagatggtgttggtggccaatgttcctagagctgagtgagtgagtaggaaaggatggaagatcacgcggggccttatgggccacattgagtaccttggcttttcctgcgaggtgccagccacagaagggcctgagcagagccaggacaggatgaaatgtgagttgtgacaggatctctcgaggtgctgaatgaggaacagaccacaggaacagaagcgggaagacagtctcttgctgtgaccttcaaggatatgcagactaaccatctcatgtgtgttcggagctcctatgtacctaaactctaagattttgaagggcttgaggttctgtggttgcaaaggttcctgcccctgcactaatgggagctccacaagggcaggaatgttgtctgtctctgagcatctgttgctctctctccagtgcctagaacagtgcctggcatgttgtaggagttcaacaaatagatgttgaaggattgaaggaaggaagaatcaatctaaggtccagaaggcaattccaggattctaaagattagaaaggacatggtgactcacgcctgtaatcctggcactttgggaggccgagacggaaggatcacttgaggtcaggagttcgagaccagcctggacaatatagtgggagccagtctccacaaaaatgtgtttgaaaaattagccaggcacagtattgcatgcctgtagtcccagctactcgggagactgaggcaggaggatggcttgaacacaggaattcgaggctgcagtgagccgtgattgcaccactgcactcaagcttgggcagcagagcaagacgctgtccgtttaaaaaatatatatattttggctgggtgtggtggctcactcctgtaatcccaacatttctggaggccaaggcaggcagatcatgaggtcaagggattgagaccatcctgcccaacatggtgaaaacccgtctctactaaaaatacaaaaattagccgggcatggtggcacgcgcctgtagtcccagctactcaggaggctgaggcaagagaatcgcttgaaccctggaggcggtggttgcagtgagccagtcgcaccaccgcactccagcctggcaacagagtgagactccgtctcaaaaaaaaaaaaattgtttttggctgggcgcggtggctcacgcctgtaatcccagcactttgggaggccacggcgggtggatcacctgaggtcaggagttcgagaccagcctgaccaacatcccgtctctactaaaaatacaaaattagccgggtgtggtggcgcatgcctgtaatcccagctactcaggaggctgaggcaggagaatcgcttgaacgcgggaggcagaggttgcagtgagatgagatagctgccactgcactccagcctgggcaacagagggagactccatctcaaaaaaaaaaaagaaaagaaaagaaataagagcagtttgagaaaatgttcagggtgacttaaacatacaggttggggaaagcatggcaagagatgagggtggaatggggggcagacaaggggaatgtcagaagcagcttccactttctcccctgggcactgggagccatggcaagttcagagcaggggaaggagaggtccaacttgtgctttaggaagactcctctggctatcacggggagaggaattgccaggagaccagggggaggttggatgggaatgtgggtggacctggttgaggagggagctgtggaaatggggaggaggggacagaggatttaggacatagggaggttagttggatgccccctctctctaggaagggcagaaacctacaaaaagccttcatggggaaattatttgatcatctgcttggaacccagagctataccacctgtgctggagaccggccagccaaatcttcagtctcggtggggacaaggagacagcgccatctggtgcttgagggtgtggccaatgaatgtggaggggagtgtcctaaggttggcagcctcttttgatgcaagctaccccagttttttgttgttgttgggtattttgagacagggtctcactcttgtccaggctgagtgcagtggcatgatcatggctcactggctcaagccatccccccacctcagcatcctgagtggctgggaccataggtgagtagcaccacacccagctaattttttattttttgtagagatgaagtctccttatgttactcaggttggtctcgaactcctggactcaagtgatcctcctgccttggcctcccaaattgctgggatcacaggtgtgagtcactgtacctggcccaccccacttttgttttttcttttttttttttaatttttatttatttatttatttatttatttatttattttttgagacagtctcactctgttgcccaggctggagtgcaacggtgccatctcggctcactgtaacctccacctcccaggttcaagtgatcctcttgccttggcctcccaaattgctgagatcacaggcgtgagtcaccatacctggcccaccccacttttgttttgtttttcttgttttaaattggtttgtttatttatttatttatttatttttcgagacggagtctcgctgtgttgcccaggctggagtgcaatggtgccatctccgctcactgcaacctccatctctcaggttcaagcgatttcctgcctcagcctcctgagtagctgggcttacaggcacccgccctcacacccagctaacttttgtatttttagtagagatggggtttcaccgtgttggccaggctggtctcaaactcctgacctcaggtaatccacctgccttgtcctctcaaagtgatgggattacaggcataagccaccgcgcccagcctaacctttttttttcatttatatttttcagcaccccacttaaaattttttttaaattctgattaagtatatataacattaaatgtaccatcttaaccatttttcagcacacagttcagtagtgttaaatgcattcatactgttgtgccaacaaacctctgggaccttttcatcttcccaaactgaaactctgtacttatcaaacaactccccattcccccctgcctgcaacccctggcacccgtcattctactttatgtttctattagtttgactcactctgtttaaaaaaaaaaaaaaaaattctgaggacacccagagttggtgcatggcccagactgggaggtcagggagtgcttcctggagaaggggaagtcaaagctgaaaccaaatagggaaaagaaagggaattgagaaagagctgtagaaaggggcaaggctgagggtggcagaagggggtggttctgacaatcagctgctgccttccctttcgtccccctcccccaggatgccccggaggcccagctagccccagacttcggccccatgcggctcacccgctgccaggctgccctggcggccgccatcaccctcaaccttctggtcctcttctatgtctcgtggctgcagcaccagcctaggaattcccgggcccgggggccccgtcgtgcctctgctgccggcccccgtgtcaccgtcctggtgcgggagttcgaggcatttgacaacgcggtgcccgagctggtagactccttcctgcagcaagacccagcccagcccgtggtggtggcagccgacacgctcccctacccgcccctggccctgccccgcatccccaacgtgcgtctggcgctgctccagcccgccctggaccggccagccgcagcctcgcgcccggagacctacgtggccaccgagtttgtggccctagtacctgatggggcgcgggctgaggcacctggcctgctggagcgcatggtggaggcgctccgcgcaggaagcgcacgtctggtggccgccccggttgccacggccaaccctgccaggtgcctggccctgaacgtcagcctgcgagagtggaccgcccgctatggcgcagcccccgccgcgccccgctgcgacgccctggacggagatgctgtggtgctcctgcgcgcccgcgacctcttcaacctctcggcgcccctggcccggccggtgggcaccagcctctttctgcagaccgcccttcgcggctgggcggtgcagctgctggacttgaccttcgccgcggcgcgccagcccccgctggccacggcccacgcgcgctggaaggctgagcgcgagggacgcgctcggcgggcggcgctgctccgcgcgctgggcatccgcctagtgagctgggaaggcgggcggctggagtggttcggctgcaacaaggagaccacgcgctgcttcggaaccgtggtgggcgacacgcccgcctacctctacgaggagcgctggacgcccccctgctgcctgcgcgcgctgcgcgagaccgcccgctatgtggtgggcgtgctggaggctgcgggcgtgcgctactggctcgagggcggctcactgctgggggccgcccgccacggggacatcatcccatgggactacgacgtggacctgggcatctacttggaggacgtgggcaactgcgagcagctgcggggggcagaggccggctcggtggtggatgagcgcggcttcgtatgggagaaggcggtcgagggcgactttttccgcgtgcagtacagcgaaagcaaccacttgcacgtggacctgtggcccttctacccccgcaatggcgtcatgaccaaggacacgtggctggaccaccggcaggatgtggagtttcccgagcacttcctgcagccgctggtgcccctgccctttgccggcttcgtggcgcaggcgcctaacaactaccgccgcttcctggagctcaagttcgggcccggggtcatcgagaacccccagtaccccaacccggcactgctgagtctgacgggaagcggctgaagccctgataacctcgcctttgtttttcgggggtctgtctggatgtggagaagctctgtgtgagcggtgaggggtggagggatgtcgcggagaggggaagggggaaactgaccaagaaagaaattctaaggagagcatgagagaaggctggcattggcaggaggagagcaccaggacgaggatgggaagcgacctccagatttatcaaatggtcatgcccactgggagccgtggatatgcgtggggacatcctgggtcatctcagtcatggagggagacggggatgtcacgccgtcccgcagggcccagcacagccccagacccgaaaaaagtgttctgcccaagattccgagagccctgcgctctagggcaggggcagagttttggaaacagtgcaggctctggagccagactggcgagattcaaatcctggctctatcgcttcggagccaggtgggcctgggggggcgtcgcagtctctctgtgcctcagttgcttccaggatgcgggacccttggctgcaggggttgcttccgccactagagggcgcgccggtcccgctcctggtggcccactgtggctgcccgggcgacagtacgcccagggcctgtgttccatagccatctactctcttgagcctttggacttctctccaagcccctgtgggaggcggacagcagtgaccacctccccttcttttggactgcgacctccttccctcctgggagagccctgtgacctgcatgctactcttaactgttctattcaagactgaatagaagtatttcagtcttgcagaggaggaaatgctcagagctccgaggtgcggctgtggtcgagaaccgggtgctgggccgggcgcgggggctcacgcctgtaatcccagcactttgggaggccgaggtgggaggatcgcttgagcccaggagtctgagaccagcctcggcaacatgccaagaccccgtctctatttttaaaaaagaaaaagaaccgacttctgaatcgcagctccactcatgactaatacctcattatttcagctgtctgcacctaattccccacttgcacggcagtgtagacaataaccatagctcacactcactgagcacctactgggtaccaggcaccattctcagtgtttcacctggatcaactaatgcgtccctcacctcagccctctgaagtgacagctgctattattttcattacacagatgaaaaagctgaggccagaatcgtgaagtcacttgctcaaggtcaggcagcttaggaaggggcagatcgggggcttgaacccaggtggtcaggctctggagcccacaattgtcttacccactatgcccctctctagtcatggtccccaagaggggcttggagacccacttagcaggtgaaagcaatggcagccttccttatttgattatgcacctaagaataaatggtatttgggcatgtattcccaatatgtgtatatttatttataaatatatacagatactattatctgtatgttagtaataaagcttaaattattccattttaaaattatgaatatgaatagggttttttttatgtttcttgcctcatcccaatgacttttgcacacccaggtgtgagcacccagcattcaagaccacgggttaaaaaaaaaaaaaaaaagctggccgggcgtggtggctcacgcctgtgatcccaacacttttgggaggctgagacaggaggaacacttgagctcgggagttcgagaccagcctgagcaatagagcaagactcttgtcaattaaaaataataaataaagccaggcatggtggctcacgcctataatcccaacactttgggagcccaaggcggacggatcacaaggtcaagagatcgagaccatcctggctaacacagtgaaactccgtctctactaaaaatacaaaaaattagctggacatggtggcgggcacctgtagtcccagctactcaggaggctgaggcaggagaatggcatgaacccgggaggcggagcttgcagtgagccaagattgtgccaccgccctccagcctgagcaacagagcaagactccatctcaaaaaaataaaataataaataagaggcaaaatgttaaaaataagcaaggactgggcacagtggctcatgcctgtaatcccggtactttcggaagccaaaattggaggatcctttaaggccaagagttcaagatcagcctgggcaacatagcgagatcccctgtctctacaaaataataaaaaaatagccactgttttagtcccttctcatgctactaataaagacctacctgagactgggtaatttataaaggaggaaaggtttaatcgacccacagttcagcacggctggggaggcctcatgaaacttacaatcatggcagaaggggaagcaaacacatcttgtgatggcaggaagaagaagttccaagcaaaaggggaaagttccttataaaaccattagatctcatgagaactcactatcacgagaatagcatgggggtaactgcccccatgattcaattacctcgcacccagtccctcccacgacacatggggattatcagaactacaattcgagatgagatttgggtggaaacacagccaaaccatatcagccaggcataatggcatgcacctgtagtcctagctactggggaggctgaggcaggaggattgcttaagcctaggagatcaagactgcagtgagctctgattgcacctctgcactccagcctcggcaacagagcattatcccatccccccacaaaaaaaaagaaaaaaagaaaagacatgggcttgaggttggagaggaccgggtttcccagtgctgccaccttctcccagggcctctattgactctgtctctgcgcccccaccttgcatttgggaagtggaagcaatgagatcgctcctcccacaggagtgtgttcgcggtaaaggggcccagagtctggctgggtttgaatcctggcttggccacttggtttctttgtactctcagacaagtcgctgcctctctgaacctgtaaactggggagattggtaatatttcacaattgtacattcctgggaggaggaggcttcatagaccagcaagagaagattactgtttggccgagtctcctgaggctcagacatccaaagcctgacttcttgtaacccaacccctgcttttaaccactgaacccaaaaatggttcacaaagagacttggcaggtccacagggaggattctggaatgcatggggatgatttgcattatcatcatgactggaagctgctcttggctcttggcagacgtggtccagggatgcagatgtcttgtaatattcaggaatctccacacagtacagcatcatcccttgtctcatgcagcttccagatgtctcattggacattcacgaaggaagggtaatattcaaaatgttttgccactggtactgtaatataaattagtatatgtcaatgtatgcatcaaatttttaaaatattttaggccaggcatagtgtaatcccagcaccttgggaggccaagacaggaggatggcttgaagccaggaattcgagaccagcctgggcaacatagagagaccctcatctctacaaaacatttcaaaaattgagcagggcgtggtggtttacaccattaatcccagcactttggaaggccgaggcaggtgaattgcttgagcccaggagttcaagaccagactaggggccaggcggggtggctcatgcctgtaatcccaccactttgggaggctgaggcgggcagatcacttgaagccaggagttcaagaccagcctggccaacaaggcaaaaccatgtctctactaaaaatacagcaattagctgggcgtggtggtgcacccctgcagtcccagctactcaggatgctgaggtgggaggatcacctgagcccaggaggtcaaggctacagtgagccatgatcatgtcactgcattccagcttgggcaacagagtgagaccctgtctcaaaaaaacaaaaatccttattatcacctaagttatgatatgacaaagatctgtcacaattaacttgaactaattcatttttattcaaatatgtattgaatttcagtgctttctcaactactcttgtactattattatccagtcagaagtatttcagtattttaacaaccagtattggccaagtatggtgactcacgcctgtaatcctagcactttgggaggccgaggtgggtggatcacaaggtcaggagttcaagaccagcctggccaatatggtgaaaccctgtctctactaaaaatacaaaaactagccgggcatggtggtgggcgcctgtagtcccagctactcaggaggctgaggcaggagaatcgcttgaacccaggaggcggaggttgcagtgagccaagatcatgccactgcactccagcctgggtgacagagcgagactctgtctcaaaaacaaacaagaaagaacagtatttccatactagttcagaccaactaaattttagccttacttggaggtgaaaaccctggccaaaaatctctctcttgtacgtacaaagtcctttttgtttttaaatagcctcggaatcttccaggaagtgcaactaccacaaaaaatgagggaagcttgtatcgtgttttgttcaaaacttggccaaaggttgtccaccatgtgaaaaaactcacattgcacatggctcttggtaattggacaccagtccacgtgttttcaatgtgttggaactgtctatattacaggcataaacatctgcctacctccttgggttctaggggactggctccacacatccgcataatgaaatgcttattgtaagttactatgttcttatttctcctttttattacatttagggcaatcaaggatcgtttttgttgctgctgctgttgttgttgtttctgagacagggtctcactctgtcacccaggctgcagtgcagtggcacagtcttggctcactgcagcctcaacttcccaggctcaggcgattctcccacctcagcctcccgagtagctgggactacagataagtactaccacacccagcttttatatatatatatatataaatatatttatatatataatgtctctactaaaaatacaaaaattagctaggtgcggtgtcgcacgcctgtaatgccagcagtttgggaggccaaggcggatggattacttgaggtcaggagttcgagaccagcctggccaacatggtgaaaccccatctctactaaaaatacgtgtgtgtgtgtgtgtgtgtgtgtgtgtgtgtgtattttaagtagagatggggtttcaccatgttgctcaggctggtctcaaattcctggactcgagtgatctgcccaccttggcctcccaaagtaggattttcttaaatcatgttaaatcatgtgccagtgggttatactgtctatgaacttcatttcaggagaacagagagaactttcccagaactgacattcaagccagcacacgccctggtatggccacgccagtggttaagacagcaaaacactaaattatggattatttactcattcataaacggtcactgccatgaaccccctgactattagtatcctcctagctctccctggggatcccctgggctgccctctggcccagaagtccaggggttaaactgggtatagtgggagataagagggacccatatcccggatgttggatggactgatgactttgccaagcagtaaatattttgtctatcagccctacatgttacaaaatatttgctatgaacaatagtggcatgtaaagacctgtctacattagccaggtgtggtggctaatgcctgtaatcccaacgctttggaagaccaaggctggaggatcacatgagcccaggaggtggaggccacccagggtaatatgttgagaccctgtctctaccaaaaaaatttaggaggggcgagtggctcatgcctgtaatcccagcactttgggaggctgaggcgggcagatcacttgaggtcaggagtttgagaccagcccagtcaacatggtgaaaccacgtctctactaaaaatacaaaaattagccaggtgtggcggctcacacctgtaatcccagcactttgggaggccgaagagggcggattacttgaggtcaggagttcaagaccagcctgaacaacatggtgaaaccccatccctactaaaaatacaaaaattagccgggcgtgatggtgggtgcctgtaatcccagctactcaggaagctgaggcaggagaattgcttgaacctgggaggtggaggttgcagtgagccgagattgcaccactgcactccagcctgggcaacagagcaagattctgtctcaaaaataaaataaggtaaataaaaaataaaaaacctgtctacaaatgcacctttatgcacaatagccccaacctggaaaccatcagatgtaaatcaacaggtgggtggataagcaaactgtggtacactcagacaacataatactccttagcaagttttttaaaaaaggaaagaactgggccggacgtggtggctcacgcctgtaatcccagcactttgggaggtcgaggcgggccgatcacctgaggtcgggagttcaagaccagcctgaccaacatggcaaaaccctgtctctactaaaaatacaaaattagctgggcatggtggcacatgcctgtaatcccagccacttgggaggccaaggcaggagaatcacttgaactcgggaggcggaggttgtagtgagccgagattgtgccattgcactccagtctgggcaacaagagtgaaactccatctcaaaaaaaaaaaaagaaaagaaaagaaagaacaaactactgatacatgcaaaaataagaataaatcccaaaagcattatgacacataaaaaaaagccagatgcaagacgctacatagtatatgattccaccaatgtaaaattctagaagaggtaaaactaattcatagtgaccaaaagcagatcagtggttaccggggcctggagctggagagaggggcagactgcaaagaagcatgaggaaatttggggatgatgagaatatcatgtatcttgattatgggagtggtttttcacagtatattcatctgtcaaaactcatttaactgtattttatttatttatttatttattttgagacagggtctcgcagcattgctcaggctggtctcaaactcctgggctcaagcgatccttctgcctcggcctctcaaagtgctggaattacaggcatgagcctggcctaattgattttaacgggtgcaatttatcatatgaaacaatttttttggagccagccttgctctgttgcccaggctagagtgcagtggtgcagtcttggctcactgcaacctctaccttctggattcaagtgattctcatgcctcagccacctgagtagctgggattacaggtgtgcacaaccacacctggttaatttttgtatttttagtggagatggagtttcaccatgttggccaggctggtcttgaactcctggcctcaaatgatttgccttgacctcccaaagtgctaggattacaggtgtgagccaccttgcccggcctattgtatgtaaattatacctcaataaagttgacctcaaaaagagcagatgggggcagaatccaacaggcctaagaacattgacctgtctctaagagagacaaaactgagtcactgccctctgcctttctgtccccatactgccactctgagcctagaacccaggaccaaccctaatccggggccagcctgggccctccttcctgggccaagctccttcaaagaggcaagaggggtgggtggggcaatggagaaagggagagaaaggtgggagctgggaactgggacccagggagtgaccgtcaaagtgccttttcttctgctcttacgtaacctgcactagcagcctttgggtgaggcataagagagccattgtcaccggcgggtgagacctggcagtgctcatccaaggtcacatagttgccaggcagcagagtcgagactgaaccagcctcttccaccattccacgagtgtttattgagctcctgctatacgcatgcaccggaccctatgctagactctgagcctacagcagtgaacaattcaaagatggttcccccacagagtgaccttcccagtggggacaggcaggaaacaataaacatcataaaccagtgaattctatcgtctgttgggaggggactgttgctattaaaaaaggagaacagggcagggcacggtggttcacaactataatcccagcactttgggaggcgtaggtgggaggatcctttcagcccaggagttcaaaaccagcctggacaacatacagagactgtgtcgctacaaaaaacaaaaattaagaaaaaaaaatagctgggcagggtagcatgggcctatagtcccagctacttaggaggctgaggtgggagtgtcacttgagcctgggaggtcaaagctgaaatgagctgtgatcatgaaactgcattccagcctgggcaacagagcaagaccctgtctttaaaaaaaaaaaaaaaaagtagagcaggcctggcgtggtggcttatgcctgtaatcccagtactttgggaggccgaggtgggaggattgcttgagctcaggagtatgagcctggccagcctgggccatagagcaagaccccatctctgtttgtttgtttgtttgtttgtttgtttgtgacagggtctatctctgtctcccaggctggagtgcagtggcgcgatcttggctcactgcaacctctgcctcccgggttcaacaattctcatgcctcagcctcccgagtagctgggataacaggcgcccgccactacacccagctaatctttgtatttttagtagagacaggtttttgccacatctctcgaactcctgacagcgagtgatccacctgtctcggtctcctaaagagctgggattacaggcgtgtaccacgacacctggctaatttttgtatttgtagtagagacagggtttcgccatgttggccaggccggtcttgaactcctggcatcaagtgatctgcctgcctcagcctccctaagtgcacagattacaggcatgagccactgcgtctgcccaagaccccatctcttaataaaaaaaaaaaaaaaaaaaaaaaaaaagaggaaaagggctgggcgtggtggctcacgcctgtaatcccagaactttgggaggcctgaggtgggcagatcacgaggtcaggagatcgagactatcctggctaacatggtgaaacccccgtctctactaaaaatacaaaaaaaaaaaaaaaaaaagccgggtgtggtggcgggcgcctgtagtcccagctactcgggaggctgaggcaggagaatggcgtgaacccgggaggcggagcttgcaatgagccgagatcgtgccactgcactccagcctgggcgacagagcgagactccgtctcagaaaaaaaaaaaaaaagagaaaagggtagaatagggtatgggttgggtgggtgagggtgggggcaggaagcaggggtggtagaattaaataaagcggtcagagaaggctcactgaggtgacattgcagccaagtcgagagggaggtgtgggaagagccaaatggaaatctggggggcagagcagccaagagaggaacagcctgtgcaaaggccctgaggcaccagcaggcctggcatgttcaaggaatggcagaggctggagtaagagagggaggaggagagtgggaagaggtgaggtcggtgaagtaaggcgcatcctacagaggctatggggagcaccttggatttttctctgggttctgagctgcggagggccacgagctgccatgatggaaacaggcgccctctggaggccatatggggaacagacggaagaggttggggctcaggagtcccggcgtgaaggcaattgcaatagttcaggtgggagatgatggcagctggccagggtggtacccagtgtggaaggtgtagaggggccagatttggggtttgagggcagagaaactgagatttctggtagcttgaatgtgggatatgacgggcagaaggagggcgtagcaggggaaggaaataaagtggcttgttctgtatgtgactggagcccagctccttgcaccaacccgggctcctgcacccctcagcaggcccagggatccccaccgccaggccggagccaaccccatggaacccaaagtgctcaagctccccagtgaatgaggctcttaatgtatcaccgcccgtcaggcctggcctggcatccgggtttctccacctgcggggtgcaggggccacattggtgggttccagattccaagttccagtatttggaggaggtggcagaggagggcccccaccccaccgttttcatctttcacccaagatttgcacaggtttcattttaatgacagtccactgtctgtttgttagttagctttgagatagagtctcactctgttgcccaggctggagtgcggtggcaagatctcagctcactgcaacctccgcctcctgggctcaagcgattctcccacctcaggctcctgagtagctgaaactacaaatgtccagataattttttacatttttagtagagacggggttccactatgttggccaagctggtctcaaactactaacctgagatgatccacctgcttcggcctcccaaagtgctgggattacaggcatgagccactgcgcccagccacccagccactggttttaaaaaatgtttgacactgggcacagtggctcatgcctgtaatcccagcaccttgggaggctgaggtgggtggatcacctgaggtcaggagttggagaccatcctggccaacatggtgaaaccccatctctactaaaaaaaaaaatacaaaaattagccgggcgtggtggcaggcacctgtaatcccagctattcgggaggctgaggcaggagaatcgcttgaacccgggaagtggaggttgcagtgagctgagatcacatcattgcactccagcctgggggacaagagcgagacttcatctcaaaaaaaaaaaaaaaaaaaaagcagtggctgggtgcagtggtgcatgcctgtaatcccaacactttggcctgggagttccagaccagcctgggcaacatagtgagatcccttgtttacaaaacaaaacaaaacaaaaacaaaaaccttttctaattaaaaatagctgggcatggccaggcacagtggtggctcactcctgtaatcccagcactttgggaggctgaggcaaatcacctgcggtcgggatttcgggaccagcctggccaacatgacaaaaccccgtctctacaaaaaatacaaaaattagccaggcctggtggcaggtgcctgtgtggggaaaagaaaaagagagatcagactgttactgtgtctatgtagaaaagcaagatataagaaactccattttgatctgtactaagaaaaaattgtttctgctttgagatgctgttaacctgtaactttagccacaaccctgtgctcacagaaacatgtgctgtaaggaatcaaagtttaatggatttagggctgtgcaggatgtgccttgttaacaatatgtttgcaggcagtatgcttggtaaaagtcatcgccattctccattctctattaaccaggggcacaatgcactgcagaaagccgcagggacgtctgcccaagaaagcctgggtattgtccagggtttcccccgactgagacagcctgggatatggcctcatgggaagggaaagacctgactgtccctcagcctgacacctgtaaagggtctgtgctgaggaggagtagtgagagagggaggcctctttgcagttgagataagaggaaggcttctgtctcctgctcgtccctgggaatggaatgtctcgatgtaaagctgaccattcccattcgttctattctgagctaggacaaaacctccctgtggctggaggcgagatatgctggcagcaatactgctctgttgccctttgctacactgagatgtttgggtaaagagaaacataaatctagcctactgcacatccaggcacagtacctttccttgaacttactcatgatacagattcctttgctcacatgtttccctgctgaccttctcctcacctgttgccctgctacactcccctcgctaagatagtaaaaataatgatcaataaatactgagggaactcagaggctggcgccagtacaggtcctccgtatgctgagcgccggtcccctgggcccactgttctctctctatactttgtctctgtgtcttatttcttttctcagtctctcgtcccacctgacgagaaatacccataggtgtggaggggctggtccccttcatgcctgtaatcccagttaccgaggaggctgaggcaggaggattgcttgaatctgggaggcagagattgcagtgagctgagatcatgccactgcactccaccctggggacagagtaagattctgtcttaaaaaaaaaatagctgggcatggtggtgcatgcctgtggtcctagctactcgggaggctgaggtgggaggatcgattgagctcaggagtctgaggctacagtgagacataatcacaccactacattccagcctgcgagacagagcaaggtctcaaatctttaaaaatattttttttttttagaaaaagtttgagccaggcgcaatggttcacacttgtaatcccaacagtttcggaggctgaggcaggcgaatcacctgaggtcgggagttcaagcccaggctggccaacatagtgaaaccccatctctactaaaaatacaaaaacttagctgggcatgttggcacacacctgtaatcccagctacttgggaggctgagacaggagaattgcttgaacctgggaggtggaggttgcagtgagctgagattgtgccattgcactccagcctgggcaatagagcaagactgtcacacacacaaaaaaaatagaatagaaaaaaaatgagtaagtaacgtttggtaaagcttgtttcatgaacatgtttttctttatacacataggttgtttatgaaatatgtaggtaggtttatagctccataaacaggcatccctcagaatataaacctaatctattcccaaaaaagtagtatatagaaactttggggataaaccactatttatttatttatttatttttttgagacgaagtttcgctcctgtttcccaggctggagtataatggcatgatctcagctcactgcagcctctgtctcccgggttcaagcgattctcatgcctcagcctaccaagtagctgagattacacgtgcacggcactaacccagataatttttgtatttttagtagaaacagggttttaccacgttggccaggctggcctcaaattcgtgactccaggtgatccatccgcttcacctcccaaagtgctgggattacaggaatgagccacctgcccagctttaatttatttctttatttgagacggagtgttgctctgtcgccaggctggagtgcagtggcgtgatctcggctcactgcaacctccacttcccaggttcaattgattcttctgcctcagcctcctgagtagctgggactacaggcgctttccactacgcccggctgatttttgtatttttacatccatgttggccaggatggtctccatctcttgacattgtgatccacccgcctcagcctcccaaagtgctgggattacaggcatgagccactgcacccagccccggcttttattttaagcagagaaaataatgcactcccagcttcatccaaaaacgctaaacaatttcctagaatatcaataaaagactcttaaacacctacataacagcctaccacggattatggcatagtagaaagcatttaaaataccaattgcctaattattcaacacttaaactcatgaatgattatgtttgtgtacaatacaaaagtattctgcacagaatcagatataaattatattttccttccgcagtgcaatgatcatggggtataactaaacaaacaaacaaacaaaaagatactaaagataccgtctataattggacccaggtcagtggtgcctccaggcacctggccaaagtcaacacagggggtttggaagcggaagataatatcaacaatggctaacacattcaacgcacaaaacagaatcctgttagaacaggtgagaagtagggctgggtgcagtggctcagacctgtaattctagcactttgggaagccaaagtgggaggatcacttgagtccaggagtttgagaccagtctgggcaacatagtgagaccccgtctctacaaataaaaattagcggccgggcgtggtggctcatgcctgtaatcccagcactttgggaggccaaagcaggcagatcacctgaggtcgggagtttgaggccagcctgaccaacatggagaaatcctgtgtctactaaaaatacaaaattagcctggcatggtggctcatgcctgtaattccagctactcaggagggtgaggcaggagaatcacttgaacccgggaggcagaggttgcggtgagccaagatcgcgccattgcactccagcctgggtgacaagagcaaaactccgtctcaaaataatgataataataataataatatttagttgggtgtggtggtgtgcacctgtagttccagccactcaggatgctgaggcaggaaaactgctaaggtccgggaagttgaggctgcagtaagccatgatagcaccactgcactcagcttgagcaacagagaccctgtctcaaaagaacaggtgagatacaacagcagcatagtacttttttctggggggggggcggtgagacagagtctcactctatcgcccaggctggagtgcagtggcatgatttccagtcactgcaacctctgcctcccgggttcaagcgattctcctgcctcagcctcccaagtagctaggattacaggtgcccaccaccacacccagctaatttttgtatttttagtagagatgaggtttccccatatgggtcaggctggtctcgaacccctgacctcaggtgacctacccgcctcagtctcccaaagtgctcggattataggtgtgagccaccgcgcccggccagcatagtccatattctgaacttacacaggatgtaaaacagttgcagagtgggtttttatccaaatagctattttggggtttcaaggaaataaaataattcttgggacaatttggatagtgagagttgggatatgaagggatgctgcattcctaagtaggtggtcacaaaggaaaataaattgttaccatgcgttgtgcagatttttgttgttgttgctcttgagagagtcttgctctgttgcccaggttcgagtgcagtggcgcaatcttggctcactgcaacctccacttcttgggttcaagcgattctccttgtgcagatttttttaagagatagggtctcaatctgttgctcaggctggagtgcagtcacataatcatagctcactgcagccttgaacccttgagctcaagtgattctctcgccgcctcagcctcttgagtagtggaaactccagatacgtaccaaccaccacacccagattgtagaaaaaatttaactggaaggcacacagggcaaaatgcatgtgatttgtgtacaggttcgttaactttcccaaatgcatccatctgtggaatcatcacccaaatcaaggtaagatatttgctttatcatagaaggttcttttgtgctcccttctgatcaatatgctattttttttttcttttgagatggagtcttgctctgtcacccaggctggagtgcagtggcacaatctcggctcactgcaagctccgccccctgggttcaccacattctcctgcctcagcctccagagtagctaggattacaggcgcccgccaccatgccctgctaattttttgtatttttagtagagatggggtttcaccatattagccaggatggtctcgatctcctgacctcatgatccgcccacctcggcctcccaaagtgctaggattacaggcatgaagccaccgtgcctggccccatattcattctcaaaggtcaccactgttctgatttcccaccataggccagttgagcatgttctagccctcctctaaatggaactatacagtatttaccgtctctggcttctttatctcaacaaattatctgaaatgcatttctgttgcagtgtaggtcgatatcgctcttatttattgctgagtaatcttccattgtatgaatgtaccagtgtatccaattgatttgttcccaaattttggcaatgatgagtacagcagctaaacgtttgtggacacatttttgtaaaagcaaaagttttcacttctcttgggtaaatacccaggagtgcaactcctaagctgcatagtaaataaatatatattatatatatatatatttttttttttttttgagacagagttttgcttttgtcacccagactggagtgcaatggtgagatcttggctcactgcaacattctgcctcctgggttcaagcgattctcctgcctcagcctcccaagtagctgggactacaggcatgtgccaccacgcccggctaatttttgtatttttagtggagacggggtttcaccatgttggccaggctggtctcgaactcctgacctcaggtgatccatccacctcggcctcccaaagtgttgggattacaggcgtgagccactgcacccagcctgtattttttaactttattaagaaactgcccagttattttccaaaacaactcagccatctactaagggagcaccaaccaagagatgaggagtcctgttgtatcccatcctcccttggtcttgtattcagccattctactgtgtatagtggtgtctcattgtggtttcccgtggtgtttaagagacagggtctggctgggcgtggtggctcacgcctgtaataccagcactttgggaggccaaggtgggtggatcacttgaggcaccggtctctactaaaaatacaaaaattagctgggcatggtggcagatacctgtagtcccagctacttcggaggctgaggcaggagaatcgcttgaacctgggaggcggaggttgcagtgagccaagatcgtgccactgcactgcactccagcccagacaacagagccagactccgtttcaaaaaaaaaaaaaaaaaaaagcgacagggtctcactctgttgcccaggctggagtgcagtggcatgatcatgggtcactgcatccttaaactcctgggctcaaggaatcctccccaccgcagacttctgagtagctgggactgcaggtgtgcaccactgcacctgcctaattttttgtgttgtttttgagacagagttttgctctttcacccgggctagagtgcagtggtgcgatctcggctcactgcaacctctgcctcccgggttcaagcaattctcctacctcagcctcctgagtagctgggactacaggcgcccaccaccatgtctggctaatttttatatttttagtagagacagggtttcaccatgttggccaggctgatcttgaactcctgacctcgtgattcgcccgcctcggcctcccaaagtgctgggattacaggtgtgagccaccgtgctcggccttaatttttgtatttttttgtagagacgatgtctcactatgttgcccaggcttgtcttgaactcctggcctggagtgatctcaaagtgctgggattacaggtgtgagcccccatgcccagcccagtggtgtttcttgatgagcagatactgtcattgcagtggccagtgctttaagtcaaattctcaagaacacctgattaaatagttgacactcaattttattgctaaaaaaaatgtcctctggagtgacagcaggtatttgtcctcagcctctccccagagtccctgggagtgtttctgttattgtggagggaataggggatctggggacagggtgggacgtaccatggggacaggaggtcacagaacacacacacacacacacacacacacacacacacacacgtgcacacacacatccccccacaactacagccgccaaaataaccagcatggtgttgtaacatccccccagtgggggctagaattccccatggtgacctgtgacctgctccctgagacaggggaggccaggcaggtcacggtggggacgcagcagaacattatttctccatcttgctgttttctagccttgagttggggacatgagtgagaactgggggttttgaggagtaacccttgtgaacacatgtactccagcagccaggcatcccagatctcctgtcctggagggtgctggggcccctggctccccagagtgtgcaggcagacccccagagccctagctcatccatttatccattcctcataatccagtgtccaaagagcacccccagcagggcagggaaggtccctcccggggtttacatgactgattccttctcagaggcgaccgtggcatcccctgcgggcccccgatagtgtttgaggagggggtttccttcctcagtggggactggcagcggatccaggggcagctcactcttcacttgtatcaactcaggctctgtgcttctcgactccgtacggtccacgtaattttggaggagtcctgcccccagagcgtcaccttctacattgaggacggtacaggaccggtcgctaaaggggtagaaatgacagcaaagtaagcgggaggggagagggtgagagggaaggaaagggccaaggcctaagcctcctgcctctctccccctggaatctaaaaagtaaaaattaagagttggagtcagcctgggcaacatagtgagatcccatctttatatatatttaaaaaaaaaaaaaattagccaggcatggtagtgcacacctatagtcccagctactcaggaggctggggcaggaggatcgctggagcctgggaggtggaggctgcagtgatcacaaccatgatcacatcactacactccagcctgggtgacagagccagactgtgtctcgaaaaaaaattataattcacctaccataaaattaaccttttaaaagtgtccatcttggtattttttagtatattcagacttgtgcaaccattgccaataattaattccagaatttttttttttttttttttttgagacaggatctcactctgttgcccaggctggagtgcagtggcacaatctcggctcactgcaacctccacctcccaagttcaagcgattctcctgcctcagcctcctgagtagctgagatcacaggacaggcgtacaccaccatacccggctaatttttttgtatttttagtggagatggggtttcaccatgttggtcaggcttgtctcaaactcctaacctcaaataatccacctgcctgggcctcccaaaatgttgggattacaggtgtgagccaccgtgcctggctgctttccaatctttatactcttaatagcttaatcgtgatagcaaataattatgtagcaattactgcttactgggggctgctctaagggaggtgtgtctgttatctaatccttagggagagactgttcttctccccgttttacagatggagaaactgagacgcaggaagattaagcacttcccgaggtcacaacagtgaatgttggagctgggatgtgaacctgagcagtctggctgaagagtctgctgtattcaccacacagacgctctacttttctgacatccctcttagagccacaaagatgccattccttgccctcaggaatgctcaaggttccccccatttcctccagaattccttccttcttctcttcctcttctgtccagaggctctaaggactctcactcactcatcctctttcccaggggtacccctggccctgccccagtctccagacccacactcacactagccagtccacagccaggatcaaggagatatggtcgaccgggaggttgactgcttcgaggatgatggccagagtgaggacacctccagcagggatgcccgctgcccccacgctggacgctgtggccgtgaccctgagggagaaggtgggaggttaggcagatgcctgtcttgtgggagaagatgggggtcaacaggggtccgggggtcccatccgcagccccctgacactcacaggatggtgatgatctttacgaagtccaaggactgctggctgagctgtgcaatgaacactgcggccacgcactggaagagcgcggcaccgtccatgttgacggtggcgccgatgggcaggatgaaacggctgatgtgcttggccacgccattattctcctccacgcacttcatcatcagcggcagcgtggcggaactgcaagggatgggggagctgagttaggttaacctgctgaccggggctccgcccaccctccaggtccagcccaggtgaggcctcgcctaccccaccccaaccagccaaagccccacccaccccacccagtggatccccaccagagcctgcctaagcaaagccctgtcacccaaccaccctccaggtctgacctgcaccacccacccagttgaagccccgcccacccagagcccacccacaccacctgcccagccaaagccccgcccacccagatcccgcccataccacttgcccagccaaagccccgcccaccagatcctgcccataccacctgcccagccgaagtcccacccacgtccccagtctgtcccttggcccaaggcccccacatctaacctagaccccccttccctcctaccatgtcctgactccacccccagccctcacttgctatatctaagctcttttcccacaagcaggcagcactagggaactcaataccaggattacaaaatccatgagtcctggaacccctgggagagtatagactactacctcccaaaatacccacacaattcacacctaaattctactgtctgggtcctgctgactctcaccaataatacactaagaattactattgtcttgggaggggacagggccagcagggatgaatgaaatgcccaggagagacggtggaaggagttctgaggttgaatcagagcagaacttaagagccccccaggggcatggcagctcacacctataatcccagcacttttggaggccaaggtgggcggatcacttgaggccaggagtttgagaccagcctggccaacatggcgaaaccccgtctctactaaaaacacaaaaattagctgggtatggtgggggacacttgcagtcccagctactcgggaggctgaggcagagaatcacttgaacccaggaggcagaggttgcagtgagctgagatcacaccactacactccagcctgggcaacagagcgagacgccattgtttaaaacaaaagaaaaaaaagagtgcctccagggccacggggaggcagtgtaagaaagagggaaataaatctctagggcaatcatttcctatctttttaagggtggggataaatccaggaccttatgagaatctcctgaagtatggcccctgtacccagatacaatgtcccgggcagagaaaatttcatccgctccatgccgcttagcggattaaacatcccaccctagcccaccccaaggccgtacctggaagaggtcccaaaggcagtggccagcggcgtcacgatgccccacaggaagcggtaggggtttttgcgggtgaagaggaagtagatgaggggcagtaccaggagcccatggatggcgtgacccagcaggcagcacagaatgtacttgccaaggcgggcaaagagtaaacccacatcctccatctccacgatcttgccagccaccaggaacatgatgcccacaggggcgtacctgatcagtaacacaggagacagcttgttgcctcttccacgggcccagtggccaggcgtgaggctcagcaccctacccacatcttcctgccttcctgaggtcaggagaagccccagcaatgtgtgcttcagcatgggcaccactcccaggcctggcccctgaagcccccatgccaatctcatgctctctttcccctcaaaggtagagcagcccggagataaaactctccgtgcaggccgggcacggtggctcatgcctgtaatcccagcactttgggaggctgaggtgggtggatcacctgaggtcgggagttcaagaccagcctgaccaacatggagaaaccccgtctctactaaaaatacaaaattaaccaggcgtggtggcgcatgcctgcaatcccagctacttgggaggctcaggcaggagaattgcttgaatcagggaggcagaggttgctgtgagccaagatcatgccattgcactccagcctgggcaacaagagtgaaactccatctcaaaaaaaaaaaaaaaaaaaaagtctcagtgcttccatcaccatgtgaagcagtcaccagatttggacttcacatgggagacagaaagaaatgtccatcaaggtgcgccattcacacttcctgggttggtttgctatggcagctagcatgacttgagccaatacgctctctgcagatgatgaaagataaagaggctgggcacagtggctcatgcctataatcccagcactttaggaggtgaaagcaggaggattacttgaggccaggagttctcgagaccagcttgggcaacacagcgagacccagtctctacaaaaaataaaaataggccaggcacggtggctcatacctgtaatcccagcatgcagggaggtgaaggcagacagatcgcttgagcccaggagttcaagaccagcctgggcaacatgtctctctttttttttttttgagatggagtctcactctgttgcccaggctggagtgcagtggcatgatctcggctcactgcaccctccgcctcccaggttcaagcgattctcctgcctcagcctcccaagtagctgggactataggcgcgtgctaccacgcccagctaattttttgtatttttagtagagacagggtttttctgtgttagccaggatggtctcgatctcctgacctcgtgatctgcctgcctcagcctcccaaagtgctgggattataggcatgagcctccgtactgggccacccagtttcttaaacaacaacaacaaaaaaaatgagctaggctttgtggctggggtctgtagtcccagccacttaggaggttgaggtgggaggatcacctgaacccaggaggtccgggctgcagtgagctgtgatcatgccacactgcactccaacctaggcaacagagcgagatcctagttcaaaaaacgtttttttaaattactattattattattatttagacagtctcgttctgttgcccaggctggagtgtactgttgcaatcttggctcactacaacctttgcctcccaggttcaagcgattttcatgcctcagcctcctgagtagtagctaggattaaaggtgtacaccaccattcccagctaatatttgtatttttttgtagagagggtttttcgccatgttgaccaggctagtctctaactcctggcctcaagcaatcctcccccctcagcctcccaaagtgctgggattacaggtgtgaggtaccacaaccagccaaaacacacatttttaaaataaaaatttgaaggccaggagcggtggctcacacctgtaatcccagcactttgggaggccgaagagggcggatcgcttgaggtcaggagtttgagaccagcctggccaacatggcaaaaccctgtctctactaaaaatacaaaaattagctgggtatggtggttcgtgcctttggtcccagctgctcaggaggctgaggcaggagaatcacttgaacatgggaggcagacattgcagtgagctgagactgtgccactgcacctccagcctgggcgacagagcaagactctgtctctaaataaataaataaataaaataaatacaaattttagaaagaccatggcctgggtcttaataacaactcccaggtatgaagcatttgcgatgtgctctgcccttgaacatgatgttgaatcttcccagcaacccccggagggaggtcctatgagtcagattgcagattacacaacacccaatagattcctcacgggaatgctgggaggatgcaatgagatgccagttgaaaggagctaaagctttttacagacaataagtgatctgtaaacttcaggtgggtttattatcaccctctcctgctgtgaagatcccagggatggctccaagccaagaggactcccaagtccgggcgcggtggctcacgcctgtaatcccagcacttcgggaggccgaggtgggcggatcacctgaggtcgggagtttgagaccagcctgaccaacatggagaaaccccgtctctactaaaaatacaaaattagccgggcatggtggcgcatgcctgtaatcccagctactcgggagactgaagcaggagaatctcttgaacccgggaggcggagtttgcagtgagctgagatcacgtcattgcactccagcctgggcaacaagaacgaaactccatctcaaaaaaataaaataaaataaaagcctcccaacatcacttccctagactactcgatcatcggtcgcccatccatcatcactgactagttatctccccagtcccttcttgtaagtcacagaagaaaggcatattttcccagccacttgtgcagagaagggaggctagatacccaagttctggccagtgggaagtatccagaagttatacaagcaaaaagcccaataaatattagctactaggatttactgtaggcacgcaataagccaggcactgtcctaagaccttccgtgtaccgtattcactttcttttcttttcttcttgagacagagtttccctctgtcgcccaggcagtggcatgatctccgcttactgcaacttccgcctcccaggcttaagtgattctcatacctcaggttcccgagtaactgggattacaggtgcgtgtccccatgcctggctaattttttcgtatttttagtagagatggggtttcaccatgttggccaggctggttttgaactcctgatctcaagtgatccacccacctcctcccaaagtgccgttcccattttatagatgaggaaactgaagcagagaaggaaaatcacttgcctaaaatcacatagacagggaatggtcaatgctggatttaaatgcaggtcatctggctccaaagagtgaatagagggtgccccatcccaaacagaatgccccgcacctgcctctggcagcagaccgaccctccaaccccacccacccccagcctcctctcccaccacctaccacatgatccaggagaccagaaccatggtggcctcattgaaggagttgaagaagcggataagcagctccccttcaggccccagcttccgcagcgccacaccaaagacgatggcaaacactaccaagcccaggatgttcatcccctccacctcctgccccacgggcacctgtgggcaaggaacagatcggggtggaaaggacactcagtctacctgcacagtcactgagggcctgtccttggcaccactgggacccagcagagacaaggcagccctcagaccccttcctcccaaggctcccagtccaggtccaggggaaatatattagtcgtcagggatggcccagagtaggtggggctggaataagggagtccaggggagtgtgggaaccaagagagggcagtgccagcttggggagtagggggcagtcaggggggacttcctggaggaaggagcatctgagctgagacctggaggacaagaggagtgaaccaggtaaagaagggtggtagaaagatctacagagaggaagcagaatgtgcaacagcctagaaatgagtgcaacttgggcattcaaagaagagccataatctactgtggctagagtagaataatctgggcagggtcactagttaaggatgggcagccaggcgggctggcaggggtttgacctcacagggagcccttggtcatagactgtagcaaggagactggactttctcctgaaggcactgaggcacatggcagggctctgggtactgcagagatagggtcacatttgtgttttgaaaagatcctcgggcggagcacggtggctcacgcctgtaatcacagcactttgggaggctaaggtgggcagatcacctgaggtggggagttccagaccacactgaccaacatggagaaaccccatctctactaaaaatacaaaattagccgggcatggtggcacatgcctgtaatcccagctactcaggaggctgaggcaagagaataatcacttgaacccgggaggcggaggttgcagtgaaccgagatcacgccattgcattccagcctggacaacaagtacaaaattctgtctcaaaaaaaaaaaaaaaaaagaaagaaagaaaagaaaagatactcagggccaggagcagtgcctcacgcctgtaatcccagcactttgcgaggcggccaaggtgggcagatcacttgagcccgagagtgcaagaccagcctgggcaacatggcaaaactcagtctctataaaagatacagaaattagccaggtgtgttatagtcacagctactgggaaggctgaggtgagaaggatcacttgagcccaggaggtggagactgcagtgagctgtgatcgtgccaccgtactccagcctgaatgatggagagagatcctgtgtcagaaaaacaacaacaaaaacctctggctggctgccagtttgagcaggttgagggtggatggaagggggcagggagagggcagcatggaatggggttggggggtgagggagaaaggaagagcctgggcacctggggtgggaaaagaggggacaaagtagagacctatccagaaggcagaaaagacagaaattggggaaggactgcagagtgtcaatcaaattccacagcaaagactaaggcagaaataaaaccaaaaaattatagcaataggcaaagaggtagagcccccgctgcctcccactgctctcaccttcaccctggttccggtgatattcctctcttcataggtggtagagtactgtaggtggggttgggaagagtcagtgtccatcgttaccagggcctcccaaccccatgccaagctaacaatgctcaaagcctgcccttccacatcctttcaatgtgatctcatttcatctgctggcaaccccatggggcaggatgatcaatacccccattttccagaggtggaaaaccgaggctcagagaggtaaacacatttacccagagtcacacagctagaattaaaactcacaggaggctctgagcccgtattctcattgacatgcatttttccaggaactaaccaaaatcaggtagcaagggctccccctggctggcatccctccctgtccacccccatcccctcaggacacccctgaggactcactgagcgaaaggctgctgacaccaggttggaagggaagatatttctgcagagacagacacacagagggttattagataccatagtgggagggcagcattgtctgagaggctgggttggcgttttaaggcagcgagtggaagctttgggggcccgcctgcacgcaaatacagcccctactcatgcctcagcccggcagggttggaactaggcttgcacccctttgcaggacttggggagtcagcctccttcagccccaagaggctggcgtgctagccctgaggcattgtgggttcggggtgaggaatgctggcctcccacggcaggccagggcaggtcgccccgggcctcagctccaccccatgcagcaaacttaataccctggacagcttgcatcagccacttcctcctggagggcctgccagcggctctgagagtatgggggaggatctgggtgtgttgggaggcggtggcggggagggagaaaagggacggcttcatatctcatgaatatgcatctgtgtttacaaggctacccttactcttgtgtgacagtgtctgccttaagatgaaaatagtagctaaggccaaggcgccatggctcttgcctggaatcccagcactttgggaggccaaggcagacagatcgcttgagccaggagttgaagaccaacctgggcaacatgacgaaaccgtgtctctacaaaaaatacaaaaattagccaggcatggtggcatgtgcctgtagttccagctactctggaggctgaggtgggaggatcactcaagcccgaggaggttgaggctgcagtgaaccaagatcaagccactgcattccagcctgggaccgagtgagactctctcaaaaaatatatatagcagctaagccatctacagcacctaccgtgtggcaggcaggcattttggcctgtgcttgacacaaattaacccatttcatcctcacgacagccttggggataatcactattaccccattttacagaaaaggaagctgaggcccagaagggtaaagaaaattgcccagctgggaaatagcagagctgggatttgaacccagccagctggctccatagccccaagcactccacatgctccctctcaccaatgactggtgtacagccaacgccatgtgcccatatacaatctgtcaaatgttaatagtttgggtgcaggttaaggttcagtagtatgggacagtgtccatggatggccacccatgcatcacggtacagtaaaataacgtcatggtagaggaatgagtttggccgggtgcggtggctcacgccagtaattccagccttttgggaggctgaggtgggcagataacttgaggtcaggggttcgagaccagcctggccaacatggcaaaaccccgtctctactaaaaacacaaaaattatccaggcgtggtggcacacggaaggctgaggcacgagaatcacttaaatccaggaggtagaggttgcaatgagccaagatcgcaccactgcactccagcctgagcaacagagactgtctcaaaaaaaaaaaaaaaaagcatgagtttattggtgtgtgaccacataggtgtgtatgtgagtgtgtattgtgtgctcttgagcctgtgtttagatgttggcgtggctggtggcatcactgaatggctgtgctacaggggtcttagtacacagtgagcgtgtgtatgaccgctggtatctggccatgtgtttgtcgagatgctacagcctcagctgagtgtctgcgtgaatgtgtccagctgtatgtcatttggttataagcctgtgtggcaggccaagtgtgagctacagctgttttggcacgcaggggaggcctgtgctcataaacagcctcggagtgggtgtgcctgcctgaaggtccgcctgtaccacccaggcccaggctgggccaggacccagctaatctcccccagccagaaggtgctcccaggcttcaactcgggacaccaagcctgccccagtctcgcatctcagcctgcactgacgccccagaggctggagaaccctgttccgtgactcatcatttccttcccccaacttccaggaagtccccaacgtggagacactgaatgagcaagccctaaaggcaagcgcaagggggcctctgccccccgccctcctcaaagtgggggaggccattcttgggggcgcggggcagaggccaggagaaggaaaagaatctgctcccctttctaactggtcctcttctgggctgcctgctagggggtggcccagacagaggaggaaacgggagggaaaggcaggggtggcagggctgatctaaaagataaaggggaagcggccagaccccagctgaaatgggcgggaagcggaggccaaaaacagagcctggttatgtccgagtgacacgtggtgtgggggtgccccagggctgggaagagggcctggtgggagttactcagatctcagatcctccaggggctccttacccaaactctccaaccctggccccaaattatatctagaagccccatcttggggcccttgaccacgcaaagattccccccgcaaaagttcctcctggggtcccctcccctcagtgtctttctcccctaggcagaccctcctatgtctccccaaatcactttcttctccctctataagaccccacttatgtacccaggcccccagatttagaaaccccttccccaggagactagactcacactcccgagggctggagcctcccctcaatatcctgtcgagttttcctaagactctagagggaagtctctgctccaggggccccaaagccccgtcctgtccacgtgaccactcccgccatccgtaacactcttccccacctcccgggggagcgggagctgacctcgcaagatccaggaacgaatcgagcacctccttgctgggggcattttcggcactgcccgcggctcccacggaggcgttgatggcggcggaggcggcgcccggctgcagagccagcgccaagcccactccgagcgccgacgccagcagcgtggtgaccaggaaaaagagcagcgcccaggcgcccagacggccgagcgcgccggggtccaggctggcggcgccgccgatcaagctgcacaccaccagcggcaagatgatcatccgcagcagacgcagcagcagctcgcccgggaagacgaaggcgctcaagcgctccgggcccaacgccagcgcacccccggcccccgacacccccagtcccagcgccacgccggccaccacggccaccactgtcagcagcacaagcaggttggctcgaaggcagcggcgcacctggtcccgggaaccgcagtagccgcctgctgccgcgccttggtcctcgatggaggccagcgccaggcccccgttggcggtgggctccgccgctgcgagccccttggagtctcgaggaggatcggccaccatgatgggaagcaccggggtttcttagcgcctggaagctggctgggagcgcttgggctccttcccaggacccgacgttcctaggactgagttgagtaacagcacctggagactggaactttggagggctccttagagttgtgagttcacagcactgaagttccttggctcttggaagctggagtgtttaaattccccaggctgggcgctgaggcttctctgctctgccccgtgtgccagatgtccgaaagctgggagttcggagcgcccgggttccttggccctaggagctgggaatacgagagtttctctgggtgggacgtggggcccttggctccaggaggttgagtgcccccagatggcggaggtctgcaggaggctaggttctggtggcgcagatcccggacgcctggatccgggaggcggggacccgggctgcctgggtcttggacactgagggctgggatgccagaatctgggggccgggaagcggacctccggaaacaggggacccaggctcttaggtccgggagggtgggatgcgggcccctgtgtacggaaggcggtggtctggtgtccgggagtagcggttaccagccagagaaagcctcccgggcgtgccgcgtggctctgagcccgtttagcggaagctgccagggataagggtagggggcggggcttgagaaggcggggaccgaccctcgggcgccgattggctgcagagcgttcggagactggacgagtaggggcggggctgatacccgagatgggccaggtcccccatagaaggcagattaataatacccatctccaggagccgggcccagagacgacggggcggggccaggaaggggcggggccttgggagggtgctgtttcccgccaaaggaactgggttgtgggttggagcccttaaaccacaggggttcgttccctggtgcgagggtcgctagaaagctccggtggtcctcggtgattcatttgcaactcaactcagctttggaactcctcagccctgagtttggtctttagtcgcctctgagaactttaattcctcgaatataaagtgcaggtgttaaaagcttttgtctcatatgattgctgtaagatttaaataaaattgatgtatttatttagggagccgtggctcaagcctgtaatcccaccactttgggaggtgaagcgggcggatcacttgaggtcaggaggtcgagaccagcctggccaacatggtgaaacccgtctctactaaaaatacaaaaattacctggtgtggtggcacgtgcctgtaatcccagctactggaagcctgaggcaggagaatcgcttgaaccccagaggcagaggaagtcattcaccttgaggccacacctagagaggatgacacgtgcatgcccacctcccaagcccctaaccgcacccactctgctgcctccccaaattctctgttagtggccgtttgggaggttaacaatgaattatgattccttactccacctgacagtgttgaaatcctcattcctttcccatctctagcctgttctgtgacatttcaggctttcatgcttgctcaaagattgtagtggtaatgtcagaagcttcctcctacagcagctgtgaggcctcaggtaatttacaacctctatgaggctcagtcttcatatgtgtaaatgggaataataataagtcataccgccttgagtgttgcaagggttcaaatgagataatacggccgggcgcagtggctcacgcctgttatcccaccactttgggagttgatgcgggcagatcacttgaggtcaggagttccagacgagcctggccaacatggcaaaaccctgtctctgctgaaaatgcaaaaattagctgggtgtggtggcacatgcctgtaatcccagctactcaggaggctgaggcagaagaattgcttgaatccaggaggcagaggttgcgaagagccgagatctcaccactgcactccagcctgggtgacagagtgagactccacctcaaaaaaaaaaaagttatttatttgtgctttaaaattttttgttctttctctcttcttttgtttctaacaaaaatgcccttcagaagaaagtcaaatactactgctgcgattgctgttattgttattattactgaagaacaagctggattcagtggcatgcacctgtagtcccaggtatttgggaggctaaagcaggaggatcccttgaggccaggagttcaaggctgcagtgagctatgatcgtgcccacatttagccactagactccatccggggcaacatagtgagaccttatctttaaaaacatgaaaataggccaggcatggtggctcatgtctgtaatctcagcactttgggaggccagagtgggcagatcatgaggtcaggagatcgagaccatcctggccaatatggtgaaactctgtctctactaaaaatacaaaaattagttgggcatggtggcatgcacttgtagtcccagctactcaggaggctgaggcaggagaatcgcttgaacccgggaggtggaggttgcagtgagccaagatcacacctctgcactccagcctagtgacagagtgagactccgtctcaaaataaataaataaatattttaaaaaatttttcggccgggcatggtggctcacgcctgtaatcccagcactttgggaggccgaggcgggtggatcacaaggtcaggagatcgagaccatcctggctaacacggtgaaaccccgtctctactaaaaatacaaaaaatcagccaggcatgatggcgggcgcctgtagtcccagctactcgggaggctgaggcaggagaatggtgtgaacccgggaggcggagcttgcagtgagccgagatcacgccactgcactccagcctgggcgacagagcgagactccgtctcaaaaaaaaaaaaaaaaaaaatttcacagtggcttacacccttaatcccagcactttgggaggccaaggtgggaggctcacttgagcccaggaatttgagaccagcctgggcaacatggcgagactccgtctctacaaaaaaattaaaaaataagctgagtgtggtggtatgcgccaatagtcccagctacttaggagggtgaggcgggaggatcgcttgagccaggaggtcaaggctacagtgagctgtaatctcaccactgcactccagcttaggtgacagagcaagactcagtctaaagggaaaaaagatttaggctgggagcggtggctcacgcctgtaatcccatcactatgggaggccaaggcaggtggatcacttgaggtcaggagttcaagaccagcctggccaacatggtgaaaccccatctctactaaaaatacaaaaacatgaaaataggccaggcacagtgtctcatgcctgtaatcccagcactttgggaggcctaagtgggcagatcatgaggtcaggagatggagaccatcctggccaatatggtgaaaccctgtctctactaaaaatacaaaaattagttgggcgtggtggcgggcggctgtagtcccagctacttgggaggctgaggcaggagaactgcttgaacccaggcgtcagaggttgcagtgagcggagatcacaccactgcactccagcctgggcaacagagtgagactctgtatcaaaaaaaaaaacaaaaaaacaaaaaattccttggctgctagagcttgcattctagtgcagagagacaagacaataaacttgggcttggccgggtgcagtggcttacacctgtaatcccagcagtttgggaggccgaggcgggcggatcacttgaggtcaggagttcaaaaccagcctggccgacatggtgaaaccccatctctactaaaaatactaaaaaattagccgggtgtggtggtccacgcctgtaatcccagatactcgggaggctgaggcaggagaatcgcttgaacctgggaggcagaagttgcagtgagctgagatctcaccattgcactccagcctgggcaacagagccagactctgtatcacacacacacacacacacacacacacacacacaaaatccttggctgctagagcgtgcattctagtgcggaagagacaagacaataaacttgggctgtcagctggaactaagcgttgggagaaagcaaaagcatcctatgagtgacagagtgaacagttcagccactggaaggaagtgacatctgcactgagatctgaaagataagaaggagcccatggcataatgtggaaacattcaaaggacgcgtgtgaagccctgaggcaacagagaggtttccatctctgttagcagtgctcacagacatggttttatccccactaatccaggagaccagctcacactcccattttcctgatttggaagcagataagggtaatgaggcttgctgtggcccaaaccccaggcataagcaagaaatctgaactcagatgtttctgatccttgtctgcatctcctatcagacaccctggctacccctgcactcggctgtctccaactagacatttccttcaagggacagtcatgtattctgagcccagtgttgggtcctgcgatgggtgataccagggacccagtggcgaacaagacagttctggccccgttctgctgggactcaaagttcagggggggacacagatagtgatgatacagagtgggcagggctgggatgggggagcccagaagggatgcttgaccaggcttgggggtcagggagagcttcctggaggaggaggcatcggagctgggatatgaaggagttggaccaatcccagggaaagaatattccagacaaagagaatagcacatgcaaaatcccagacttctggccaggcatggtggctcacgcctgtaatcccagcactttgggagactaatgcgggtagattgctggagaccaggaattccagaccagcctggccaacatggcaaaaccctgtctcttctgaaaataaaaagtaaaaaaaatagccaggactaatggcacacgcctgtaatcccagctattctggaggctgaggcaggagaatcacttgaacccagaaggcagaggttacggtgagccaagattgcaccactgcactccagcctgggcaataaagcaagactctgtctaaaaaaaaaaaaaaaaaaaaaatcccagacttcagaagagtctggaatatttcaaagcacagatctaactgggccacccctactctctgaacagccccagtggcctccctcaggatgaaaaccactcttcagctaggcatctgtccgcttggtgattcatttattcattcattcaacaaaccacatccacagaatagaagactgagagacatcaaatagaaggagacggatgcccatgagctgacatgggatcgttgtgatgactcatctggccaatatttatcaaacactgagaaaaacagatgaggagccgggagcagtggctcactcctggaatcccagcactttggaaggttgaggtgggtggatctctcaaggccaggaattcaaaaccagcctggccaacatggtgaaacctcatctcaactaaaaatacaaaaattagcggggcgtggtgctacctacccgtaatcccagctactcgagtggctgagacaggagaatcacttgaacctaagaggcagaggttgcagtgaaccaagattgcaccactgcactccagcctgggcgacaaagcatgaaaagaaaaaaaggcaaagaaaaacagatgagaaaaacacgagcaaaacagatgaaaatcccttctctgctagcactgatattctagcagcaggacacggtcaataaatactaaacataatatgcatgtaggctaagtgggttatctggcttgtaacttattgtcacaaagcagaaagtgctgtggagggaaatatatatgtatgtatgcatgcattaggaaaagtgaggaattagatgaatgaagggtaaattgcaataataaatcaggctgggatcagtggttcacaactataattcgaacacttttggaggccaaggcaggaggatcacttgagctctggagttcaaggttatagtgagctgtgatcgtgccactgctgcactccagcctagggaacacagtgagaccttgtctctaaaaaaataaaaattaggtggtcacaaaagtatagagggaggccaggcacagtggcgcacacacttgtaatcccagcaacctgggaagctgaggcaggaggatcgcttaagctcaagagttcgaggctaggcacaatggctcatgcctgtaatcccagcactttgggaggccgaggtgggtggatcatttgaggtcaggagttcaagaccagcctggccaacatggtgaaaccccacctccactaaaaacacaaaaattagctgggcatggtggtgggtacctgtaatcccagctactcaggaggctgaggcaagagaatcacttgaacccagaggacggtattgcaccactgcactccagcctagacgacagagtgaggctccatctcaaaaaaaaaaaaaaaaaaaaaaaaaaaagagtttgagaccagcctgggcaacatttcgaaagctcatctctatgaaagaatacaaaaattaaccgggcgtggtgatgcacgtctgtggtcccagctactcaggaggatgaggtgggaggatcacttgagactgggaggttgaggctgcagtgagcagagattgcaccactgcactccagcctgggtgacagagggacaccctgtctcaaaaaaaaaaaaaaaatagaaaggggaaaatcaaggtgcgagaaagtgtgtatagaatggggaaaagcaaatgaacacagcatctgttttattttttaatttttttaatcttttatttttattttattttatttatttatttatttttgagacagagtctcaccctgtcacccaggctggagtgcaatggcgtgatctcagctcactgcaacctctgtctcccaggttcaagcgattctcctgcctcagcctcccaagtagctgggactacaggcgtgtgccaccatatccggctaatttttgtatttttagtagagacggggtttcaccgtgttggccaggatggtctcgatctcctgaccttgtgatctgcccacctcagccacccaaagtgctgggattacaggcgtgagccactgcacccagcaaattttttatttctatttatttatttttttgagacagagtctcactctgtcgcccaggctggagtgcaatggcacaatcttgcctcactgcaacctccacctcctgggttcaagtgattttcctgcctcagcctcaagagtagctgggattacaggcacccgccaccagacccagctaattttttttgtatttttagtagagatggggtttcaccatgttggtcaggctggtcacaaactcctgacctcaggtgatccacccacctcagcctcccaaagtgctgggattacaggtgtgagccaccgcgcccagccaacagcatctcttttaaatgcattgactattcaagaatttgcagaaactgctaaaaggatttgctttcaggaaggaaagctgtggctttacagttcggtgccgggaccctgaaatctgtcatcttgaccttggatctcacttagcagctgaaagatcttgggcaaatcattcaactctcctgtctcagtttgccgggctgtgcagtggggatcactgtagcttctgccttggagatcacggaggggtgagcagagttcatgtgtatggagtgctttggttggtgcccggcaaatcacaaccccatggtattttaagttatgacgactttttgcagataaatattataaagaacggaaaagaaagaaagatttcttctaggctgagtgcggtagctcacacctgtaatcccaccacgttgggaggtcaagacaggtggatagttcaagtccaggagttcgagaccagcctgggtaacatgacaaaaccccgtctctacccccaaatatacaaaaattagccgggcgtggtgacgcaggcccgtagtcccacctattctggaggctgtagtgagaagatcgcctgagcctaggaggtggatgttgcagtgagctgagatcgtgccactgcactccagcgtgggagacagagtgagaccccatctccgaaaaataaaataaaagagaaaagaaaagagatcgcttccagtgcataccccgggcacagattcacaagctgggagcttttcccctgaggacccagggaccactggacaaagggaggcctgagaggcccctgagggacccagcagctggtgaccgggctgcggtgtggaagctctggcagccctccaggtaatcagcgccccagggtttggacaagaggcccaggccagttgggcaacttgagcacaggccaggctcagcctagtcactgcccacccactctagggctagaggtgccagacagggggatgttggagggaggaggctccaggactcaggagaccccagaatcctagacccttcagggaatgtggggtgggtctaagccaagagggcatggtttgagggtttggatgatgttgcctggaacgcctcacaccctgccctcccgcttcttagagaggaaaatataccagctggtctcagccggctttcctccccctaagccaaacctcctacccagattctgatttcatcattggaaaaaaaaaaaaaaaaaaaaaaaaaaaaggcctggggctccaggaagggggtgagagagaccaggaagaggctggatcccacagagcagagaggccctttctggcctcagtttgccacctaggaaatggctttaggtcttgtcttgtattgtcttgtcttttttctcttttcttttcttttcttgaaacagttttgctctctcgcccagccaggagttcagtggcgcaatcatagctcactgcagcctcaaactcctgggttcaggctatcctcctgcttcagcctcctgagtagctaggactataggcacacgcaaacatgcctggctaatttcttaaatttttttgtaggggccgggagcggtggctcacgcctgtaatcccagcactttgggagtccaaggcgggcggatcacgaggccaggagatcgagaccatcctggctaacacggtgaaaccccgtctctactaaaaatacaaaaaattagccaggcgtggtggcgggcgtctgaagtcccagctactcgggaagctgaggcaggagaatggcgtgaacccaggaggaggagcttgcagtgagctgagatcgcgccactgcactccagcctgggcgacagagcgagactccctctcaaataaataaataaataaataaataaataaataaataaataaaaacagtaggacagaggaagcaatcagatatgcattagtcttaaatgagcagagggatgactttctacctgtgaagacgagctatcagtttatgtgaccagggtgaaattcaacagaactgttttagggtaaaaatcttgaggctcacaaggaatttccttgtgggcaaattgtgagggagatatgtagcttttttttttttttaatctttgtagctatcttatttagggataaaatgggaggcagatttgtctgacatagttcccagcttaacttttcccttggcttagcgattttggggacagacccaagatttattttcctttcacataagaaaaaaaagcaggccaggcacagtgcctcatccctgtaatcccagcactttgggaggccaaggcaggtggatcacctgaggtcaggagttcaagaccagcctggccaatatggtgaaaccccatctctactaaaaatacaaaaattactcaggctgtggtggtgcatgcctataatcccagctatttgggagactgaggcaggagaattgcttgaacacaggaggcagagattgcagtgagtcaagatcatgccactgcactccagcactccagcctaagtgacagagcaagatcctgttaaaaaaaaaaaaaaaaaaaaagattcctggactgctagaatctgcatttaataaataccccaggaggttgtgggaggcttaaaattacatgggtttattctctgaaaagtccagagattccagcctggacaacatagcaaaaccctgtctctacaaaaatgcgaaacttagccaggcatggtggctcatgcttgtagtcccacctaattgggagtctgaagcaggaggatcatttgagcccaggaggcagaggctgcagtgagccaagatcacatcatggcactccagcctgggtgacagagcaataccctctcttaaaaaaaaaaaaaaaaatccagagagtgaagttcgaaatggtttcactgggctgaaaccaaagcgttagcagggccacgctctgttaggaggctctagaggagaatctacatccttgccttctccagcttctcgaggtcatctgtgttcctcggctcatggccttttcctccatcttcaaaaccagcagcatagaatcttcaaatctctctgcttccatcatcccactgccttcattctcttctatgtcaaatatccttctgcccctctcttataagggcactcgggattaatttacggcccacccagttaggccaggatcatctctccatctcaagatcttttattgactcacatctgccaagtctctgttgtcatttaaagtaatattcacaggttctagggaccaggatatctttgaggtttattaggcagccaaccacaggagccatgcatggatacagggtatgtaaattcatgggactggttggagattcactaggaagtgagtatagtagggccaaagaaaacaatgggttcaatatgaaaggctgaaaagacaagaaaacctagctacttgggaggctgaggcaggaggattgcttgaacccaggagatcaaggctgcaatgagctatgattgggccactgcactctagcctgggcagtgtagtgagaccccatgtctacaaaaacattaaaaaaatagataggtgtggtggcatgcaactataatcctacctactcaggaggcaggggcaggaggatcacctgagcccaggagatcgaggctgcagtgaggtacgattgtgccactgaacttcagtcttaacacacacacacaccagagtgcattgtaaaagtaattattattttgtgaaatttttgcttaatttatatacatatttgcacacatactgcattccaggtaaaatatacatctagctagggtgtggtagcttgcacccaagtccctgctagtgagaggctgaggtgggaagactccttgagcctaggagttcagaccagcctgggcaacacagcaagtccccatctctaaattaaattccttgagctcagaaattggaggctgcagtgatctcaccactgcattccagcctgggcaacagagcgagaccccatctctaaaaataaaataaatatgctaggcacggtggttcacacctgtaatcccagcactttgggaggccaaagctggcagatcacttgaggtcaagagttcgagaccagcctggccaacatggtgaaaccccatttctactatgaatacaaaaattagccgagtgtggtggcagtcccctgaaatcccagctactcgggaggctgaagcaggagaatcacttgaacccgcgaggcggaggttgcagtgagctgagatcacaccactgtactctagtctgggcgacagaacgagactctgtctcaaataaataaataaataaatagataaaataaataatcataaaataaatacatgaaatgtatacatcctgttgtggatcaggtgtctctagttcaaaattacttgagaaacactggtgtgccaagccttctgtggtccatgagtctcaccacgtcactcctttcctcacacatttttttttttttttgagagggagtcttgctctgtcgcccaggctggagtacaggggcgcgatctcggctcactgcaagctccgcctgccaagttcaagcgattctcctgcctcagcctcctgaatagctgggattacaggcgcccgccaccatgcccggctaattttatttttgtacttttagtagagatgggttttcaccgtgttagtcaggatggtctcgatctcccaacctcgtgatccacccgcctcggcctcccaaagtgctgggattacaggcgtgagccaccgcgcccggcctcctcgcacatttttctcttcatttctccagaatcttcacatttccactcaggaatctgctgagtccaccagtctgggtcacgtgtctccccaggcttcccccaggcccctggactcctaatcccagccctggccaccctgagtggtcaaagtctggggaccacggtttgccacctccattggactgagggtgggggttggctgtctccacctccactgtgtcccaagcacggccctgcctggggccaggcacacagaagggtcttcaggaatgtgggttgatgctttgctttcagaaataggaaggaggaccgggagcactggctcacctctgtaatcccagctactccagaggctgaggctgaaggatcatttgaacccaggaagtgggttcaagtgactccatctcaaaaaaaaaaaaaaaaaaaggctgggctcagtggctcatgccttaatcccagcactttgggaggcggaggtgggtggatcacctaaggtcaggagtttgagactagcctggccaagacggcgaaacctcatctctactaaaaatacaaaaaattagccggatgtggtggtgggcgcctgtaatcccagatactcaggaggctgaggcaggagaatcacttgaacccgggaggtggaggatgcagtgagccaagatcacaccattgcacgccagcctgggtgacaagagcgaaatgtcgtctcaaaaataaataaataaaataaaataaaaattaaaaaaattaaaaagtaaattaaattaaaaataaaaaagagaaagaaacaggaaggaaaggaggagatgtcaggagcgttgcacattccagcctggggaactggagaacagccctgcccttctcttcctacctccctgattgtttatttaagagctggcctgtctgggcggctcagccctgtctcccccagctgcagggtggcaggccccagtggctcctggtgcaattgtaactcagggccgggcgtggtggctcacacctgtaatcccagcactttgggaggccgaggtgggcagatcacatgagaccaggagttccagaccagcctgggcaacgtggtgaaacgccttctctactaaaaatacaaaaaattagccgagcgtggtggcaggagcctgtagtcccagctactcgggaggctgaggcaggagaatggcgtgaacctgggaggaggagcttgcagtgaggcgagatggctccactgcactccagcctgggcgacagagcgagattccgtctcaaaaaaaaaaaggtaactcaggtttctgagccttgaagcccaaagctggggtggcaggcactgccctccccacctcccccaaaatccagccaaggtggggacttgtttccctaccacagcaaggtcccagcctgggaacctacaggtatttcagggctcaggtgacctggatggaaagacattcaatacttcctaggaggcaggataagacaatggttgagggggaaatggaggcagagagatgggcctccccagcttcttctttttttttttttttttttttgagacagagtctcgctgtgtcacccaggctggagtactgtggcacaatctcggctcactgcaacctccacctcccgggttcaagtgattctcctgcctcagcctcccgagtagcagggattacaggcccacgccagcatgcctggctaatttttatatttttagtggagacggggtttcaccactttggtcagactggtctcaaactcctgacctcaagtgatcctcccacctcggcctcccaaagtagtgagattacaggtacaggtgtaagccaccacgcctgacacccccctacttcttagatgatcttgggtaacggattccatctctgaacctcgggtcatctctgaaataggatgaaagtaatacctaccccagatgtgccagcagcagtaaagaaaaccttagcataggtctgggcaatgccatgagatcagtatattaggggctggggggcctatgactgtgattgttactttttgctttagagagccctagtcagatgtgagtcaggccatacaatgcagcctctgaagggacatagccctatgggcgtggagggggaggttgtgaaatagccttgccctgggggtctgagggaacagggtcctaccctggcgggtctaaggcctgccctgggggtctgaaggatcagatatctcaaaaggccaatctacaacagcggtgttattggggcagtagcctatcttctaacctccaggataatggctgataatcttttatgtctgcgccttagcagtactcagggtcctctcctccccgcagcctgatgacctcccattaactttacaaaagcggttgagttttgggcaaagcctattatttaaactgtaccctaaatgtcttccaaagtttggcccaatagcccaggaataatgaagggaaaggcaagatgaagtatgggttagcttagcttactgttataatttttcttactgatataatttttgcaaaagtgggccaggcacggtggctcacacctgcaatcccaacacttgggaggtcgaggcaggtggatcgcctgagatcaggagttcgagaccagcctgggcaacatggtaaaaccctgtctgtactaaaaatacaaaaattagctgggtgtggtggtgcatgcctgtaatcccagctactctcaaggctgaggcaggagaatcgcttgaacccaggaggcggaggttacagtgagccgagatcgtgccactgcactccagcctaggtgacaagagtgaaattctgtctcggaaaaaaaaaaaaaagatttttgcaaaggcagtttcaggtttgaggggacacaggcccagccctttggggtctgaggggacataggcctgcccttgggggtctgaggggacgtaggcctgcccttggggggaagcgctgagaggacatggccctataaagccaattctagggccaggcgtggtggtttatgcctataatctcagcactttgggaggcccagacaggtggatcacttgaggtcaggagttcgagaccagcctggccaaatggtgaaaccctgtccctactaaaaatacaaaaattagctgggcgtggcggggggcacctgtaatcccggctactcgggaggctgaggcaggagaatctctggaacccgggaggcagaggttgcagtgagccgagattgtgccactgcactccagtctgggcaacagagtaagactccctctcaaaaaaaaaaaaaaaaaaagccaattctgagagtatacaatcacacagcacattcctagtgattatgtgggtgtcacccctgagggcagttggcctgaaggaccaggacattttgagtctgggaggcactgctaccagctcagacgcctgggcctagacatcccttgaataaactagctaatgaaaggtcccacctccacttctcctttctgagagaagtgtgaggcctggggcctggatttgagaggtgttagaatttgcactttagcccagagtgaggagcagtgtaggtgctgattaacaggaactggacaaagtcctcccagagctgaagagccctggcattttgggggtgggaggggcagggcaaaggggctccagtgagaagcacacctgaggctccagtgaggcccatgaaaccgaggaggctaatcccatcctgacacagacaaggcaaccatgtctcaaagtcccacagccaatgaatgaaacagccaggagagaggccaggacctgggaactttatgcttccaaccaccaaagccccgtggtggggggcctcatatggcctgagaaaatcagcaacacacattccacacaactgctttcttccaagggccaatttattattattattattattattattattattattattattattattttgagatggagtctcactctgtcacccaggccggagtgcagtggcgcaatctcggctcactgcaacctttgcctcccaggttcaagcaattcttgtgtcttggcctcccgagtaactgggatttacaggcatccaccaaccatgcctggctaattttgtatatatatattttaatatggaacgcttcacacctgggattacaggtgtgagccactgcccccggcccgaatgccaattaaaaaacaaaaaactttactattattatttttatttaagggacaaggtctcactctgtcacccagactggagtgtggtggtgagatcatagctcactgcagcctctaactcctgagctcaagtcatcctcccatctcagcctcccgagtacctgggactacaggtgtgcaccaccaatacacacatacagatagatagatagatagatagatagatagatagatagatagatagatgatagatagatagattagtttgtttgtgatggagtcttgctctgttgcccaggctggagtgcagtggtgccatcttggctcactgcaacctctacctcccaagttcaagcgattctcctgcctcagactctcgagtagctgggactatgggcacatgccaccacacccggctaatttttgtatctttagtagagacagggtttcaccagaaaaaaaaaaaacttatttgctttatcttttcgctttcccctggtcctgccagcctgattccttttcccgaattaggactccacaactaatgtttatcgaacatttactatagcccagaggtacagcttctcagcaaaccaatgggtcctattaatatcctcattttatagctgagtaaacagaggtacagacaggtgatgtgacttggccaaggtctcacagcttaattgagagagtcacatttttttctttctcttttttatgattattttaaaatttttaatttttttttagggacaagatctcgttctgtcacccaggctgggatgcagtggcatgatcatagctcactgcaaccttgaactcctgggctcaagcaattcttccgcctcggcctcctgagtatagctgtaatctcagcactttgggaggctatgcagggtggattgcttgagcccaggagtttgagaacagcctgggcaacatgacgaaaccccatctctacaaaaaatatagtagctgtgtaccagctactcgggaagctgagcctgggaagtcaatgctgcagtgagctgtgattgcaacactatacttcagcctaggtgttggagtgagaccctgtctcaaaacacacacacacacacacacacacacacacacacacacacacacacacacagcctgacagaggcatgcactgttgaaggtgataacgtggaagaggacaaaagtgacaggccaggtgctgggcctcatggcagcgttcaaactcctggagccagctatgcctgaagccagcccatcgattcctgatgtcgctgaagagttacaatcaggttttcagccacttgaaacagaaagagaccaaacgtacccagggaagggacaagtggattcagcccactgatacggcaatgggaagtagggttcatggaagggggaaaggcgggaccgtgtaaaagtgagtaggaacacgacccattccaggggacagacagcagatcatcggggtggctgccatgcaaaatttataaggggtcatggtgaggtcatggtgccacctttcagttgcaagagaaagggagaagccgtgactattgtgaaagcaaagtagaatctcaggaccccgaattcactaggtcaaagggaaaattaagctggggaactgaggcaccagtactgtcttccttttgttcccagattgctgtaattttccaaccccgtatcatagcttaatttactcttttttttttttttttttctgagacagcgtctcgctctgttgcccaggctagagtgcagtggtgaatcttggctcactacaacctccgcctcccgggttcaagcaattctcctgcctcagcctcccgagtagctgggactacaggcacccgccaccacgcctggctaattttttgtatttttagtagagacggggtttcactgtgttagacaggatggtctcgatctcctgacctggtgatccacccacctcagcctcccgaagtgctgggattacaggtgtgagccaccacgcctggccattttttaaatttcattttatttattttttttgagatggagtctcactctgttgcccaggctggagtatagtggtaagagctcagctcactgcagtctccacctcccgggttcatgcgattcttgagctcagcctcctgagtagctgggattacaggtgcctgccaccacacctggctaatttttatatttttagtagagacagggtttcaccattttggccaggctggtcttgaactcctgacctcaggtgatccacctgcctctgcctcccaaagtgctgggattacaggtgtgagccaccgcacccggccaacaccggatcgtatcttgaagggagaagggcttcatgcaggatcagtggggaacatcaaagggtctaagcagcagagtgacacaatcaagtttgtgtttagaagcttctgcactctcacacatttgctggtgggtgtggaagttggtacggcctccctggaaagccattaggcaaaaggccttaattttagatcctcccacaccctttgacacagcagttcttctctgagggatttattccacggctattgtcttgcatgcgaaaaatcaccacagccctgcttgcagtagcaaaagactagaagcaaactaagcacataccaggaaggaaccagcaaaatatgttgtggccattcatgctatggaacactagacagctgtagaaaagaatgagccacgtttacaggcattgcactggcgtgctggtaaatacttaaccaggccgggcatggtgtacttccagcattttggggggcctaggtgggagaagggcttgagcccaggagtttgagaccagcctgggcaacatagcaagaaccctgtctctacaaaaaaatacaaaaatttgtctgggtgtggtggcttatgcctgtaatcccaacactttgggaggccaaggtgggcagatcacttgaggccaggagttcaagaccagcctggccaatgtggcaaaacgctgtctctactaaaaatacaaaacttagccaggtgtggtggtacgtgcctgtattccgagctgtttgggaggctgcagcatgaaaatcacttgaacctaagaggtgaaggttgcaatgagctgagatcacaccattgcatccaacctgggcgacagagctggactctgtctcaaagaaaatacaaaaattagctgggtgtggtggcacgtgcctatagtcccagctactcaggaggctgaagagggaggatcgcttgagcccaggaggtcgaggctgcagtaaactctgattgcaccactgcactccagcctgagtaacagagcaaaatcatccatatatatatatgtatgtatgtgtgtgtatatatatatacacacacacatatgtgtgtatgtgtatgtatatacacatatgtatatatgtgtgtatatatatatatacacatatgtgtgtgtgtgtatatatatatatacacatatgtgtgtgtgtgtatatatacataattttttttttttgagacggagtctcgctctgtcgcccaggctggagtgcagtggcatgatctcagctcactgcaagctctgcctcccaggttcaccccattctcctgcctcagcctcccgagtagctgggcctacaggtgcccgccaccacgcccagctaattttttgtatttttaatagagatggggtttcaccatgttagccaggatggtctcgatctcccgacctcatgatctgcctgcctcagcctcccaaagtgctgggattacaggcgtgagccactgcgcccagccaatatatatatatatatattttttttttttttaatttaaccaccagctctctagggaagaaacagccctaatttataccatttgccaatttctacagtgtaaatattcccactgtggttgatttctagttactgataggatgtcattggatgtggaattcagaagagacaagcaaccacccactatcactcaggatttccaccaggcagagataagtagcctggagagcatagataatagtaaaaatgtagcaattaggatgcaatgcatttgaactatttattatatttgtttttaacataatttatttatctgtaactttgtatcatttaattgttaataatacctatgtttaacaactggtttgtgaaattcccaaaagtgtagcaatctgctcttgagaactgggcacagcacacattgagacacaaatggatcttcaagaagagaaagcaaaagccaacttttggaaaatggcctggaaggttctacactgctcactcccttaattttaattttatttatttatttatttatttatttatttatttatttatttattttttgagacagggtctcactctgtcacccaggctggagtgcagtggcgcaatcgcagctcactgcagccccctgggctcaagcgatcctcccatctcagccatctgaactacaggcacgcaccaccgcacccagctaattttaaattttttttttttttttggagatggaatctcactatgttgcccaggctggtctcaaactcctaggctcaagtgatcctcccacctcggcctcgcaaagtgctgagattacagatgtgagccactcgcccagccgtcattgtatttctgtacagcactgtctttctcccccactagaatgtcacctccacaagggtaagaacttgatctattttggattgttttttgtttttgtttttgtttttgccatatgcccagtgcctagaaaagcacctggcatataataggtacttagtaaacctgtgttgaataaataaatttactatttatttatttatttattttgagacggagtctcgctctgtcgcccatgctggagtgcagtggtgcaatcttgggccactacaacctccgtctcccgggttcaagtgattctcctgcctcagcctcccgagtagctggaactacaggtgtgtgccaccacacctggctaattttttgtatttttagtagagacgaggtttcaccatgttaaccaggatgttctcaatctcctgaccttgtgatccacccatctcagcctcctgaagggctgggattacaggcttgagccaccgcgcccggccaatttacgcttaaggaaaaaaaaaaggtgcaccagcctggacaatatagtgagatcctgtctgtacaaaaatttttaataaattatccaggtgtcatgggcttcagcctcaagcgcatggccgctcccattgaccatgtgggccagaccatagagcacatgggctctggcgtggagcacattggccctgccatcgaacacgtgggcctgaacatggagcacatggtgcttgcaggcatggaggctggcttggagcacatgggccccatgatggatcacatggtcactggcctagagcacatgggtgccaagagcctcacgtgcatgggcctggccatgtgtggcagtggcggtgccacctttgaccatgccatcggtatggagtgtggcaactttggaagctttgcaggttcccttggtggagcaggagaccatgctcctgggcatggccaggaaggcatgccaaatatttgtaagaaatctcccattcaattttacatggaagatgctaaaggacaaattcaacgagtatggccacatgctgtacactgacatcgaaatggagaacgggaagtccaaggggtgcagtgtggttaagtttacgtccccagaggtggctgagagagtctgccggataatgaacaacatgcagctgaatggccaagactgatgttcaaataaatagaaatgcttaagcagttgccttttttaaacatcaataccagacctctgaatttgtattttttcttgttaactttttttttttttttttgagacagggtttcgctcttgtctcccaggctggagtgcagtggcgcgatctcggctcaccacaacctctgcctcccggcttcaagagatactcctgcctcagcctcctgagtagctgggattacaggtatgtaataccatgccggctaattttgtatttttagtagagacagggtttctccatgttggtcaggctggtctcgaactcctgacctcaggtgatccgcccacccttggcctcccaaaatgctgggattacaggcatgagccactgtgcccggccctcttgttaacctttttatttttcttttccttttttttttttttgagacacagtctcactctgtcgcccaggctggagtatagtggtgcaatctcagctcaccgcaacctctgcctcctgggttcaagcgattctcgtgcctcagcctcccaagtagctgcgaccacaggcatgtgccaccacgcctggctaagttttgtatttttagtagagatggggtttcaccatgttggccaggctggtctcgaactcctgacctcaagtgatccacccgccttggcctcccaagtgctgggattacaggcatgagccaccacactggctttttttttttttttttttttgagacagagtctcgctctgtcgcccaggctcagtgcagtggcgcgatctcggctcactgcaagctccgcctcccgggttcacgcccttctcctgcctcagccttccgagtagctgggactacaggcacgcgccaccgcgcccggctaatttatttatttatttttatttttgtatttttagtagagacaggggtttcaccatgttagccaggatggtctcgatctcctgaccttgtgatccgcctgcctcagcctcccaaagtgctgggattacaggcatgagccacagcgcctggcagctttttttttttttttttaatttagcattttaattttttttttttttttttttgagacagagtctcgctctgttgccaggctggagtgcagtggtgcaatctcggctcactgcaacctccaactccctggtttaagcgatcttcctgcctcagcctcctgagtagctgggattacagacacgtgccaccacatccagctaatttttttttctttttttttgtatttttagcggagacggggtttcaccatgttggccaggatggtttcgaactcttgacttcgtgatccacctgcctcagcctcccaaagtgctgggattacaggtgtgagctaccgcgcctggccaatcattttattatttatttatttatttatttacttttgagagagtctcgctctgttgcctacgctgtagtgcagtggcacagtctcaactcactgcaaactctctctctcaggttcaagcaattctcctgactcagcctcccaaatagctatactacaggcactcaccaccacacggggctaattttttttgtatttttagtttcaccatgttggtcaggctggtctcacctgacctcaggtgatccacacaccttggcctctcaaagtgctaggattataggcatgaaccaccacgccagaccacttgttaaccattttaatttgttggctggatgtataaagatgttaaaaaagcttgaacccagggaggcagaggtttcagtgagccagagatcgtgccattgagctctagctgggcgacaagagcaaaactctatctcaaaaagaaaaaaaaaaaagaaaaagatggtaaaaaaaaaaaaaaaaaaaaccagttgctttttgggctaatttaattacttttttaaatgactggtgttccatttgactgtttgccttgagattgcactgtgcgcaattttttttgtagttatggtgtcttcttgacattgaatatgattttgataataaatactggttcttgaaaaaaaaattagccaggtgtgctggtgcacgcctatagtcctagctacttaggaggctgaggtgggaggatggcttgagcccaggagttggaggatgcaggtgagccctaattgtgccactacactgcagcctgggtgacagacagagagacagagagaccctgtctcaaaaataaataaatgaggccaggcaaggtggctcaggcctgtaatcccagcactttaggaggccgaggtgggcaaatcacgagatcaagaaatcgagaccattctggccaacatgatgaaaccctgtctccactaaaaatacaaaaattagctggatgtggtagtgcgcgcctgtagtcccagctactcgggaggctgaggcaggagaattgcttgaacccgggaggcggaggttgcagtgagctgagatcgcaccactgcactccagcatgggtgacagagcaagattcagtctcaaacaaaaacaaaaacagaaaacaaaattagctgggcctggtggcacatgcctgtagtcccagctacttgggaggctgaggcaggagaatcgcttgaacctgggaggtggaggttgcagtgagctgagatcgtgccgttgcactccagcctgactgacaagagcaaaactttatctcaaataaataaataaattaaataaatgaaagttgcagacacatgtgaatgacctgggcagcatttctccacctgcgcttgcatttgctagacagtctgtgactctctgtgggagaaaacacaagaaaccggcccctctgctggttccccacctggcctggctctcctgttctccaccctgcacactcatgcctcggaacctgcttctcctctgagcctccctcacagtggcccggcccacgtggcctttaatctgcccacatcagagcctccacctccggcctatggcccatcagaggcagctggagccgggcatcctccccacgtgggcctttgaggatgggatgaaggaagctgagcggaggtcgcagtgcctcccaggaggggcctggaggggagggaacaggggagaggagaaggtttttccactgtgtcccctcctgtgactgtagaaatgagccatgtgacttcaattacctattaacattttttgaagtgttctataaaaagtgccagcctcgggctaccgtggggagcagggaaggaggagggtgagtccaggcgtgaggaggccggagcggtgacccgggagtggggacggccggggctgccaggcagtcacagcctgtcccagaaggccccgtggtggaatgctgtgcagaaagtccttagaaggctctggcgggggcggcctgtccctcagcaccctcctctctaagccaacttcagggtttcccggaaaggcatctcctccaccacctctgcccctacccaaaatgatccccaaatgtctggtggataaaaactctcgatctttccttcgcactaggtctgtaagggtgggagctgactcacatctggccctccacctccacccttctcctctctcctccccgcctccttctctctcacctctgtcctctcccttcctctccctcctctccctctttccctcctatccctcctcctccctccaacccctcctcctcccactgcctctcccaccctccctcctttcagcgagacacaacctcctccagggcccccaaaacaccaaccctctctctgctccacacctttgcccctgctgttccctggtagatttcatttgaatttctctgatgattcatgacattgagcatcttttcgtgtgcattatgggccatttgtatgtcttctttgcagaaatgtctattcaagtcctttgctcatttttgaatcggggtgcctggaactctctgccctcatccccgcccccgccacctcttcaccaaaccctgttttctcctggagatcttggatccttccttcatctaacaaatatttgccggacgtcaaccctgtgtcgggcaccctgccagggattggggaacacagggttaggagaggctacattgtagtggagaaggcaggaaataaaggagtcaacagagactgcaaacaagggaatgttttcttttcttttttttttttttctacagtgttcatgggcttgatttaaaagcttgcttatttatttatttatttatttattcattcattcatttatttatttttgagacagggtctcattctgtcacccaggctggagtgcagggcgtgatctccactcactgcaacctctgcctcctgggttcaagtgattcttttgcctcagcctcctgagtagctgggattacaggcgcccgccaccacgcctggctaatttttatattttttggtagagacagggtttccctgtgttggcgaggctggtctcgaactcctggcctcaagtgatcctcctgcctcagccacccaaagtctgggattacagacatgagacacagtgcccagccaaaagcttatctttcttatttatttatttatttatttttgaaacagagtctcactctgtcgcccaagctagagtgcagtggcacaatctcagctcactgcaacctccacctcccagtttcaagtgattctcctgcctcagtcccctgagtagttgggattgcaggtgtgcaccaccacacccggctagttttttctgtttttagtagagacaggatttcaccatgttggccaggctggtctcgaactcctgacctcaggtgatctgcccacctcggcctcccaaactgctaggattacaggcttaagccaccgtacctggcctatttgtttttggagatgaggtctcgctattttcctcaggctggactcaaattcctgggctcaagtgatcctcccacctcagcctcccaaaatcctagtgtttacaggtgtgagccccagcacttgacataagagaactattttaaaatttatttttagagacagagtctcaccccatcacccaggctggagtgcagcagtgtgatcatagctcactgcagccttgaactcctgggctcaaacaatcctctcaactcagcctcctgagtagctgggactacaggcgtgcaccaccatgcccagctaatttttttgatttttttgtagagatgaggtctcactatgttgcccagactggtcttaaactcctgggctcaagggatcctcctgcttcagcctcccacagtgctgagattacaggcatgagccactgcacctggccaagacaattttttgaaagagctcagtgctgcaagaagaattcgtctgcaatctgagtgaggataaggaacctgcctgatgagggactgagaagagagaagctggcaaaagaaatagcaagtgcaatgaaccagacgtgagaatgaacttgaagtggtcaggaatcagatggagaccaggggccatggctcacacctgtaatcccagcactttgggaggccaaggcgggtggatcatctgaggtcgggagttcaagaccagcctggccaacatagtggaaccccgtctctactaaaaatacaaaaattagctgggcatgttggcgggcgcctgtaatcccaactacttgggaggctgaggcaaaagaattgcttgaacccaggaggtggaggttgtagtgagccgagatcacgccactgcactccagcctgggcgacagagcgagattctgtctcaaaataaataaataaacaaaaatgaaaagaattagaaggaacagggtggctggattcaagggattgtggggaagtgtcatcagatgtggctgaagaggtaggttgagatgggcatcatagactctgtgaagaacttaagaacctcctcttccaggaagcccttcttgactgcatcaactaggttttcccatcccagccctgttcccactaggttgttgctcttggggcactggcctatctgctccgctggcctgtgagccctctgacggccaggccagtcaccactatgtcctcagcatcacctagcacaggcctgagcacacaggaggtggtcggtaaatgcccaggtcattctggcactgccagcaagccccaagaagcatcccttgctctgcctccccgccgcgcacctctgttcctgggcgtagcaccagggattcctgagttccccgtttggccattcacactggtttcagcctagcctctttcatcccatcctcaaaggcccatgtggggaggaggccgggatccagccgcctctgatgggctgcaggccggaggtgaaggctctgaagtgggcagatcaaacgccatgtgggttgggccgccgttggggaggctgagaggagacgcaggttcccaggcatgagtgtgcagggtggagaacaggagagccaggccagatggggaccagcaaaggggcccatatgttcacccgtctttataataacacagcttccaattgttgattcattacggccaggtacagggttaattttttttttttttttttttttgagacagggtctcactctgtcacccagactggagtgctgtggtgacatcatggctcactacaggcgtgtgctaccatgcctggtttattatttttaaaaatgttttgtaggctgggtatggtggctcaagcctgtaatcccagcactttgggacgctgaggcggacggatcacctgaggtcaggagttcaagaccagcatggccaacatggtgaaactccatctctactaaaaatacaataattagccgggtgtggtggcaggcacctggagtctcagctactagggaggttgaggcagaagaatcgctttaacccaggaggcggaggctgcagtgagccaagatcacgccactgcactccagcctgggtgacatcacgagactctgtctcaaaatagaaaaaaatgttttgtagaaacaggatctcactatgtcacccaggctggagtggaggcaccgttgtagctcaatccagcctcgaactgctgagctcaagtgatcctcccacctcagcctcccaaagtgctgagattatgggtatgagccaccatgcccagctaaaagtcaattcttttgatagaaaggtcagaagagcagagaagatcaaacagctggttcatgtgctgatgggaatgatctggatttctagattccagaagagaagcaagagaggaaagtggctggattgttgtcgttgagtaagcaagaggggaaccatccctaggctcaagagaagaggtcttgagaaagagtatatggcagccaggcgcggtggctcacacctgtaatccaagtactttgggaggccgaggcgggcggatcacgaggtcaggagatcgagaccatcctggctaacatggtgaagccctgtctctacaaaaaaaaaaattacaaaatattagccaggtgtggtggcaggcacctgtaatctcagcaactcaggaggctgaggcaggagaattgcttgaacctggaaggtggaggttgcagtgagccgagatcacgccattgcactccagcctgggctacaagagtgagattccgtctcaaaaaaaaaaaaaaagaaagaaagaaagagtataaggcactctgagaggctgaggcgggcggatcacttgaggccaggagttcgagactagcctggccatcatggcgaaaccccatctctactaaaaatataaaaattagctgcttgtggtggtgcgtgcctatagtcccagctactctgaggcacgagaatcacttgaatccaggagacagaggttgctgtgagtagagatcacaccactccactccagcctgggtgacagaaaaaaaaaaaagaaagaaagagtgtataaggctggacacagtggcttatgcctctaatcccagcactttgggaggcggaggctttcaaatcacttgaggccaggggtttgcgaccagcctggccaacatagtgagacctcacgtccactaaaaaaaaaaaatacaaaaaattagctggacatggtggcacacacctgtaatcccagctacttgggagactgaggcatgagaatcgcttgaaacagggaggcagaggttgcagtgagttgagatcacactattgtactccagcctgggtgacagactaagactctttctcaaaaaaaagaaagaatatagttcagccgggcacagtggctgatgcctgtaattccagcactttgagaggctgaggcgggaggatgccttgagcccaggggtttgagaccaacctgggaaacagcaaatccccgtgatatgatttgggtgtgtgtcctaacccaaatctcatgtagaattgcaatactcagccaggtgcggtggctcacgcttgtaatcccagcactttgggaggccgaggcgggtggatcgcaaggtcaggagttcaagacaagcctggccaagatggtgaaaccccgtctctactaaaaatatataaattagctgggtgtggtggcacgtgcttgtaatcccagctactcaggaggctgaggcagagaattgcttgaacccgggaggcagaggaaacgcacaaagcaaggcagcaaaagcagagatctattttaaaggaaagcacacttcacagggtgggagtggactcaagctagcagctgaaaagtgtccgttacagaatttttggggatttgaataccctctggaagtttcccattggcctgtgaccagtctgattggttgtaggagaggaccaattcgaatgaagagtaggcctgtaaccagtctgattggttgtgggagaggaccaattagaatgatgcataggcccgcagccagtctgattggttgcaggagggggccaatcagaatgaagagtaggctcaggaccagtctgattggttacaggaggggaccactcagaggtactttcatttttcaacagccatgcagaaaaaggagggtttgaaaggggagtagcctctgatatccagtcatcatgaattggccttaggctctctggctccagaccctattctcctgcctcagttagagtgatgcaaggagggccttgagctgaggaatgtggacagcttcctgaagctggacagggcaagagagcctccaggagaagccctagagtctccagaagggatgcagcccagccaacaccttgatattagccctgtaaaacccattttgggggcctggggcaatggtttatgcctgtaatcccagcactttgggaggccgaggcaggaagatcgcttgagcccaggagttggagaccagcctgggcaacataggaagagtctctacaaaaaattttttaaaattagccgggcatggtggcacacacctgtagtctcagctacttgggaggctgtgacaggagaactgcttgagcccaggaggctgaggctgcagtgagccatgatcaggccactgcactccagcctgcatcatagagccagaccctgtggtaaaaaaaaaaaaaaaaaaaaacctccagaacagtaaggtagtaaataaatctgtctcctatggagccactaagtgtatggtcatttgttacaggagcaataagaaaccaatacccttggctgtgcacggtagctcacccttgtaatcccagcactttgggaggccgaggcaggcggatcacctgaggtcaggagttcaagaccagcctggccaacatggagaaaccccgtctctactaaaatacaaaaaaaaatcagctgggtgtagtagtggtgggcgtctgtaatcccagctattcaggaggcgagactgaggcaggagaatcacttgaacccgggaggcagaggttgcagtgggccgtgatcacggcactgcactccaggctgggtgacagagcgagacttcgtctcaaaaaaaaaaaaaaacaaaaaaagccagtcacagtctgcatggaacagaggaagagcgggtggaagatgaggtcagacagagaacagggagctggtgagtcatggtgaagatgttgtcttttagtgagtgtggcaggagccacagaagggatttgaggaggagaatgacatcatgtcacttctgtcaaaggattctgctgccatatggggacctttctgttggggacaagggcagaagcagcgaggaggtgactgcaattttccaggtgagaaatgatcatggctagactagctctgggggttcagactttgtttttgtttttgtttttgtttttgtttttgttttgaggtggagtctcgctgtgtcttgtccaggctggagtgcaatggtgcgatcacggctcactgcagcctccatctcccagcttcaagcgattctcctgtcttagccttccgagtagctgggattacaggcgtgtgccaccacacctggctaattttgtattttttagtagagacggggtttcaccatgttggccaggctgatatcgaactcctgacctcaggtgatccgcctgcctaggcctcccaaagtactgggattacaggcgtgagccacggcgtccagcctttggggggtccgacttcgggtgcattttgaaggtcaacaggatttcccctggatgggatgtggggtgtgaaagcagagaggagtcatgagccctttctaagtttccagacagcatgcttgaacacacgatggtttctctggggctcaaggacattaggctactcctggcccttagcgtgtagctgtacacaggaagtgtcctgctgtgctgtattaattaaagtggatgttgtcagccgagttggagacatcccgggggaggaaaggccgggctgaccctggttaacttcaggcaggtgtcaggcatgcagcgaatgtcatcttccgcctctcattctccctctgggctgggcctgcctcttctttccccagctagcaaataaatcatctctcccatctccacctggaattcattctcactcatgtttaatgaggctaccacacccttctgccaggtgtgtcttcacccaggtcgctgataactacaaataggttatatttcaactcttttgagtatgctgtgaggtagagatccaatttcctgctgcgtgtgcagaacagaagacaactgtctcaaacaaaaagaaaaaccaaaacaattattttaggcctggcgcagtggctcacacctgtaatcccagcactttgggaggctgaggcaggaggccgagctggagctcagtagttcgagaccagcctgcgcaacatagggagacccctgtctctgctaaaaattttaaaaatcagcctagcgtggtggtgcacgcctgtagtcccagctactagtgagactgaggcaggagtgatggcagtggctgctgtcattacaccggctgcagcagggaggtgcggctggggctacacactccatggagccggtggaagccctgccccttctgagctgtggtgggagttccccagatgccactgcagccgcccaaaccgccactgtggattgagccttcctgtgctcttgcaggggccagaagtaggtagggtctgccctcccgggtgcagctgcagctgcccccatggctgccaacctaggcctccagctccacagagtgagcaagagccggggacaagtgggagccccaccccttccgagttggcagggcaggagctccccggatgcagctgtggccgccctctgaggctgaggacctgggcctctctgcagcctgcactctcagaggccgggaaggcccccccaatctctgcagactgctgggtgtcttctcctgctgcctggcctctcttctctcccagcgccagctctgatctgggatcggggttggggtccagtcctggggccatgaatggcagcaggaggcagacggattcctgggcagaagttggtggggggtccctagtaaggccccaccttcttgccagggagggcctgaaggctgggggccaggctgccaaccccacagacaagagtggggacttgtacctcctctgggcccacgcatggcagcccatggaccaaccagcacgtacttcctcctctctgaggtccataaaagccccaggctccaccagagcagggcagagggcagaggacagagagacaatgggattaccacctgcacagaggagctaccctctctactgagagcttcagagacctgcagagacgcctacatgacctgcctgccgagaggaaccaccctcttcagggcctcatctctgctgagagctgaacactcgatggggtgacctgcctactgagaggagctgcccactgacggtctcctctgagctgttctaagactaaataaagctcctattcatcttcttcacccttcacttgtctgtgtacctcattcttcctggacacaggacaagaacttgggcaaaggcactgcagccacagaggtttctggccagaaaagcaacaccccaaagatcccgtaacaggaggatcacttgagcccaggaggcggaggctgcagtgagctgagattgcaccactgcactccagcctgagtgacagagcaaggccccaactaaaaaacaaaaaacaaaaaaagcccagatattttataataaaaaaaaaattttatggctggccacggtggctcacgcttgtaatcccagcactttgggaggccaaagtgggcagatcacttgaggtcaggagtttgagaccagcctcaccaacacggtgaaaccccatctttactaaaaatacaaaaattagccaggcatagtggcacacgcctgtaatcccagctactggggaggctgaggcacgagaattacttgaacctgggaggcagaggttgcagtgagctgagatcgtgccactgcactccagcctaggcaacagagtgagactctgtctcaaaaaaataaaataaaataaaataaaaaataaagtgaatgggaagacacagagtctagcactctagaaatctgggttccagtctcatctgctcattgtgtgtccttgggcaaatgatcttccttatctacaaagaggagataatactcagaattgcaatgctaataccaagagccacttcacagcgtcattacaagattaaatgggattatgcctttaaagccttggaagctgctgggcctagagcaggagctccccctaacagttcagaagcttccttgaggctgggctcggtggcttacacctgtaattccagcactttcggaggcagaggtgagcagatcacttgagcccaagaggttgagaccagccggggcaacatgatgaaaccgccatttctttttttttttttttttttgagactgtgtctcgttctgttgcccaggctggagtgcagtggcgcgatcttggctcactgcaagctctgcctcctgggttcacaccattctcctgcctcagcctcccaagtagctgggactacaggcgcccgccaccacgcctggctaattttttttttttttttgtatttttagtagagacggggtttcaccttgttagccaggatggtctcgatctcctgacctcatgatctgcccacctcggcctcccagtgtactgggattacaggcgtgagccaccgcgcccggccttgaaaccaccatttctacaaaaaacacaaaaaattagccagacttggtggcatacacctgtaatcccagctacccaggagactgaggtgggagaatcacccaagcctgggaattcaaggctgaaatgagccatgatagtgccactgcagtccagcctgggcaacagagtgagaccctgtctcaaaaaacaaataaaaccgccaggcacggtggctcacacctgtaatcccagcactttgggaggccgaggtgggcggatcacgaggtcaggagatggagaccatcctggccaacatggtgaaaccccatctctactaaaaattcaaagaattagctgggcatggtggcacgtgcctgtaatcccagctactcaggaggctgagttagtagaattccttgaaccagggagtcagcggttgcagtgagccaagatggcgtcactgcactccagcctggcgacagagaaagactctgtctcaaaaaaaaaagaaaaaagaaagaaaaagaaacaccgtctctaaaaatacaaaaattggccaggcatggtggtgggcacctgtaatcccagctacttgggaggctgaggcaggagaattgcttgaacctgggaggtggaggttgcattgagccgagatcgcgccattgcactccagcctgggagacagagtgagagtctgtctcaaaaagaaacaaaaacaaaaacaagaagcttccttgtttggtggctttctcaggttcctcttcgactttctgttctctaaaccctggagcccctcaaaagcccagaactgactctggcctgtgctttagtgcagttgcaccagggttgcaaacacatggcctgagggctccatccagccaccacatttcgtttgccaccccagagtatttttaagttttttggtttgttttttttttgagatggagtctcgctcttgtcacgcaggctggagtgcagtggcacgatctcagctcactgcggcctctgcttcagcctcccaagtagctgagattacaggcgtgcaccaccatgcccggctaacttttttatttttagtagagatggggtttcaccatgctggccaggctgacctcagatgatccgcctgcctcggccccccaaagtgcttggattacaggcatgagctaccacgtctggcccccatgtcttaaaagaaaataaaagacaggtgatctccactccacaggctccaccacccgcgtggtcttaagggcaccaacttgagtggctgtcactctcagctgactgagacttactcttgcttcccatttcactgagaagaaggaagtcattggagtagggacttttgggaactccccacaccaacaccaccaccacctgccttggcgcccacgcaccccttcctcccagatgcctctcgtgtgcttggataatcccagctgcgccttccatccctctcccatctctttcctgcatcttccggtttccccttgtctgttgcatcatccccatcagcataaaactgatgatttgagctgagcgcggtggctcacacttgtaatcacagcactttgggaggctgaggcgggcggatcacttgaggtcaggagtttgagaccagcctgacgaacatggcgaaacccagtctccactaaaaatacaaaaaattagcggggtatggtggcgggcgcctgtggtcccagctagttgggaggctgaggcaggagaatcgctggagcccaggaggcaaaggttgcggtgagccgagatcgcacaactgcactccagcctgggcatctgtctcaaaacaaaacaaaacaaaacaaaacaaaaacctgctgtgatatcatccactccaccaaacaccctccaatctcattcccccctctagcgactatttctcttctccctttatagcaaaacttcctctaaggttttttttttgttttttttttttttattcaacattatcatcagacacttatatttagccatcaacagcatgggtgcaaaacaaaaatctacattaaaaccctttgttggaatgctttgcactttccacagaagagaaactgaaataacctgttatacgattagtcacaaatacagtcctggagttttttgtttttgttttttgtccatatacatgagtattgtctccaatacatcttccactgggtatggtggctcatgcctgcaatcccagcactttggaaggctaaggcgggaggattgcttaagccagggagtttgagatcagcctaggcaacatagtggaacttcgtctttaaaaaatattaaaaaatcaggagccgagggtggtggctcacgcctgtaatcccagcaccttgggaggctgaggtgggtggatgatttgaagtcaggagttcaagaccagcctgaccaacatagtgaaaccccatctcgactaaaaatattttaaaaatagccggatgtggtggttcacgcctgtaatcccaggtactcgggaggctgaggcaggagactcccatgaactaaggaggcagagcttgcagtgagctccagcctgggcgatggagggagactgtgtctcaaaaaaaaaaaaaaaaaataggcaggcatggcggcacgcacctgtggtcccagctactcgggaagctggggtgagaggattgcttgagcccaggggttgagactgcagtgagctgtgatcatgccactgcactccagccttgtcaacagagtgagagcctgtctcaaatcaaacacggccgggcgcggtggcgcatgcctgtaatcccagcactttgggaggccgaggcaggcggatcacaaggttgggagatcaagaccatcctggctaacacggtgaaaccccgtctctactaaaaaatattaaaaaaaattagccgggcgtggtggctggcacctgtaaatctcagctactcaggaggctgaggcaggagaatggcgtgaacccgggaggtggagcttgcagtgagccgagatcgcgccactgcactccagcctgggcgacagagcgagactccgtctcaaaaaaagcaaacaaacacaaaaaacacaccttcttcataacagacaggccctgccacccctgtgcctggctgagttcacaagtctgtttgtaacctgagcttccctgtcatttccctggctctgtctgctggctaagcttcatttccccaaagtaactaaagctttctgccaccgccctggccaccagggctgctggaactgccatagccatcttggtttcatgttttggcaaaatattggcctccatcaccataggggccagggcttctgcctccaaatcctcctcccttcatggatccaaaattcgaagactgattgctgttatggccaagattactacagcttttgccacctccaaaactacttccatcattactgtgatggggttttgtttgtttgtttgtatttgtttttttgtttttttgtttttgtttttgacagagtcttgctgtgtcgcccaggctggagtgcagtggcacgatctcggctcactgcaacctccacctatgggttcacaccattctcctgcctcagcctcccaagtaggtgggactacaggtgcccaccaccacatctggctaacttttgtattttgtatctcttcctgaaacacctgtgcagacacaaacagaaataatgttttaccagctatgtgggcaccccttaacccaatcaagttgacacatacaataaaccatcactgctgggtgcagcggcccacgtctgtcatctcagcactttgggaggccgagccacgtggatcacctgaggtcaggagtttgaggccaatctggccaatatggcgaaaccctgtccctactaataatacaaaaattagccaagcgtggtggcaggcgcttgtagtcccagctactcgggaggctgaggcaggagggttgcttgaacctgggaggcagaggttgcagtgagccgagatcacgccattgcactctagcctgggcgacacagcaagactctgtcacaaacaaagaaacagacaattagccaggcgtggtggcgcatgcctgtaatcccagctacttgggaggctgaggcagaagagtcgattgaacccgggagggagaggttgcagtgagccgagatcacgccattgcactccagcctgggcgacacagcaagactctgtcacaaacaaagaaacacaattagccgggcgtggtggcccatgcctgtaatcccagctacttgggaggctgaggcagaagaatcgcttgaacccgggaggcggaggttgcagtgagccgagatcgtgccattgcactccagcctgggtaacaaaaacaaaactccatctcaaaaaaaaaaaagaagaagaagaggaagaaggccaggcgcaggggcttgcacctgtaatcccagcactttgggaggctgaggcgggcagaccacttgagctcaggagttcgagaccatcctggccaacatggtgaaaccctgtctctgctaaaagtacaaaaaaaattaactgggtgtggtggcacatgcctgtggtcccagctacttgtgaggctgaggcaggagaatcgcttgcactgaggaggcagaggttgcagtgagccgagatcacgctactgcactccagcctggccacagagcaaggctctgtctcaaaaaaagaaataataatcttttggatgttgttcttcagtgtcctctaatgccatcaacaaagatacttttatatatatacacacatatagatatgtatatatatatatgtatagcatagttatcaaatttaggagattaaatactgatgtattacattttatttaatatgaaatctatgataagaggaagaaatcatacacacagttgacagttcagatttataaaaagcataaaattagcatagataaattattgatgactaatgacactagctataagtttctactgtagaatacgtcacaccgtgaatgtgggtcattttttccgccactagactgagtcattgagcacagaagatacatcaattttatgtgttagcaacatgtacaattctttttttttctttatttcttctaaaaaaaaaacaggatacatgtacagaacgtgcaggtttgtcacgtaggtatatgtgtgccatggtggtttgctgcacctgttggcctgtcctcaaagttccctccactcacccgatccttttttctttttttttttttttttttgagatagggtctcgctctgtctcccaggctagagtgcagtggtgtgatcacagctcactgcagcctcgcgtccaactcttgggctcaaatgatcctcccacctcagcctcccaagtagctgggattacaggcaggagccaccatgcttggctagttgaatttaatttttatttatttatttatttatttttttcatagagacagggccttgctattttactcacgctggtctcaaactcctcggctcaaatgatcctcctgcctcagcctcccaaatctgggattagacgtgagccactatgcccagcccagagcatttttatcacccaaaaatgaaactccacaaacattaagtaaacactccctgctctcctcttcccccagcctcgggcaaccactaatctaccatctgtctctgtgctgtacatttcatgtgaatggaattctgtgctaggtggcctcttgtgtctggcttctttcactcagcatcacatcttcgaggttcactcatgttgtagcatgcgtcagtgctgcatttttttctttcttcttttttttttttttttttttttgagatggagtctcgctctgtcacccaggctggagtgcagtggcacgatctcagctcactgcaacctccacctcccgggttcaaacgattctcctgcttcagcctcctgagtacctgggactacaggcacgtgccaccacgcccggctaattttttttgtatttttagtagagatgcggtttcaccatattgtccaggctggtcccgaactcctgacctagtgatccgcctgcctcggcctcccaaagtgctgggattacaggtgtgagccaccgcgcctggctgagttctgtacttttaagcttttctcttgacataaaattcagacgcgaaatgcagtttccgtgcagtgaggcacacaaacacctttgctgtggattccccatttcgcacatgggaacagatgcattttcccaggcaattaaataccaaggacttcctgaaggcactgagtgtccaggccaccgagtttgtccttgagtagctgtaaacaccctcacccccgggtatccaggaatctgcccgatgccctggtggccagctccaggcattaacagcttcctccccatttccagcagtttccttcagttactgagtggaaagttactgagtcagaggctgcggagatgaggttccttggcagatggctttcatttttacctctccctacctccctgtcgtccacacagccccaacacacacacacacacacacacacacacacacacacacacacacacttacacacacacagacctgttttctttttctttttttttttttttgagacggagtctcgctctttcgcccaggctggactgcagtggcgctgtcttggctcactgcaagctccgcctcccgggttcacgccattctcctgcctcagcctcccgagttgctgggactacaggcgcccgccactacgcccggctaattttttttgtatttttagtagagacggggtttcaccgtgttagccaggatggtctcgatctcctgacctcgtgatccgcccgcctcagcctcccaaagtgctgggattacaggcgtgagccaccgcgcccggcctttttttttttttttaatttttttttttttttcaacccatgtggaccaggttggcctcgaactcgtgccctcgaaccctcgcctccctgagggtccgagggcccgcgcaaccggctggagccacaatggctccacctgttttcttatctacaaaacatctgtttttatttaatatacatcattttatttaatatgggagggagaagaacagcagaaatagctccttaaagccccgttctacaggatgtagtggggaagagggaagctctgacgttagtctctcccttcatccatttcttttataaactgcctgctctatttttataaacattttgtcctggataaaccttcccaaaggccataatatacaatgaagaaagactaacagaaagcaaaacactaaacccttcttcctgaaaaaagataccacatacaaagtcaaaagacaaaagcagcctggggggaatgtttgtgacatgtatgacagactgtggatccacaataaataaagagctactacaaataaacaagaaaatgacaaacagcacaggaggaaaatggtcaaaaggtttgtaccaacacagaagaggaatatgaatgactagtaatgttcgacctcattggtaaccaggcacaataaaataaacatagtgagatcgcacagtagcaaagctacatggaaacagggggtctcctcctatgctaccagagagtaaaaatcagcacagcccgtttggagagcaattggggtgaacctatcaaatgacctgttacagatacatgtacccttcagcccagagattcatttccaggtacttaccctccacatgtatgtgaaaatgcacgtgggcaaagacattctttcatcttcattaggaggagccacgcaggcctggttaagtaacataggatgcacccacataacgggattccacacagactatacacagaatcacctccaagatgcactgatagcaagctgcagaaccacatacggtgtgatcctaagacatcgaaaaaaccagttatatcctcacaagtacgtgcatgaaatttatttatgtatttatgtgttttatttattaatttgtttccaatatggagcttcgctctgttgcctaggctggagtgcaatagcacaatcttggctcactgcaacctccgcctcccgggttcaagcgattctcctgcctcagcctcccaagtagctgggattacagggatgcgctaccacatcggctaattttttgtatttagtagagatgtggtttcaccatgttggccaggctggtccacccacctcggcctcccaaagtgcggggattacagatgtaagccactgtgcctggccttatttctttattttgagatagggtttgttctgttgaccaggctggagtgcagtagctagatcttggctctctgcagcctcaataccttgggctcaagcaatcctcccatctcagcctcccaagtagctgggatcgcaggtgtgatacctaccatgtccaggatatttttcttttttttttttttggtggagatgggggtctcactatgttgctcaggctggacacgaactcctggcctcaagcaatcctcctgccctggcctcccgaagtgctgggattataggtacgagccactgcgcctggccgggttcattccttttcaatgttgaggagtgctccattgcctggaggggccagagtttgtttttctattcatttttgaagaatatttaggttgtttccagtttttggtgaataaaaccactataaacattcgtgtggccaggcatggtggctcacgcctgtaatcccagcactttgggaggccgaggtgggcggatcatgaggtcaggagatcaagaccatcctggctaacacggtgaaacttgtctctactaaacaaaatacgaaaattagccgggcgtggtggcaggcacctatagtcccagctacttgggaggctgaggcaggagaatggcatgaacctgggaggcggagcttgtagtgagccgagatcgcatcactgcactccagcctgggagacagagcaagactctctctctcaaaaaaaaaaattcttgtgcattttcgttgtttttctgtttacaactacaaggtaaatgtcattcattcaggtgttttgtaacatctttgttgacatatatttacataccattcaattcacttatttaaaatgtatacttcggccaagcgcggtggctcacgcctgtaatcccagcactttgggagcaggaggggggtggatcacgaggtcaggagattgagaccatcctggccaacatggggaaaccctgtctctactaaaaatacaaaaattagctgggcgtggtggcgtgcgcctgtagtcccagctacttgggaggctgaggcaggagaatcccttgaacccgggaggtggaggttgcagtgagccgagactgtgtcactgcactccagcctagcgacagagggagactccactaaaaaaaaaaaagtatacggccggccgcagtgactcacacctgtaatcccagcactttgggaggccaaggcgagtggatcacgtgaggtcaggagttcgagaccagcctggccaacatggtgaaaccctgtctctactaaaaaaaacacacaaaaaaattagccaggcatggtggcatgtgcctgaagtcccagctacttgggaggctgaggcaggagaatcgcttgaacccgggaggtggatgttgcagtgagctgagatcattgcgatcatgccattgcattttagcctgggcaacagagcgaaattccctcacaaaaaaaaagaaaagaaaagaagttaagaaagacagaaaagaaaaggaaaagagaagagaagagaagagaagagaaaagaaaagaaaagaaaaagtaaagaaagaaaagaaacccaagccaggttcagtggcttgcgcctgtaatccccgcccctcagaaggccagggcataccaaagttattgaaataagaaatcaagaaagagagaaaaaaaaaagaaagaaaaacaagtaaaaaggaggctgaagcaggaggattgctcaaggccaggagtttgagaccagcctgagcaacatagcgagaccctgtctcgaagaaaaataattttaaaattggccaggtttaaaacaggcacagtggttcacgcctgtaatctcagcactttgggaggccgaggcgggcagatcacgaggtcaggagatcgagaccatcctggctaacgtggtgaaaccccgtctctactaaaaaatacaaaagattagccaggcgtggtgggcacctgtagtcccagctactcgggaggctgaggcagaagaatggcgtgaacccgggaggcagagcttgcagtgagccgagattgtgccactgcactccagcctgggcgacagagcaagattctgtctcaaaaaaaaaaaaaattaaaattaaagtttttaaaaaaattggccaggtgtggtgatgcacacctgtagtacaagatactcgggaggctgagggaggaggatcactggagcccaagaagtcgaggctgcaatgagctatgatcacaccactgtctggcagacagagtgagaccctgtcttctaaaaacaaaacaaaacaagaaagaaccccagtaccctttagctatcatctccctcccatttcccctgggttctgacaacccgtcatcattttctgtctctctgcacttgccttttctgcatgtttcctataatggatcattcaatatccggccttttgtgtctggcttctttcacttagcttaatgttttccagcttcatccatgtcaagtgttacagtagctagttaggcacattttttttttctttttttttgacgaagtttcactcttgttacccaggctggagtgcaatggcgtgatctcagctcactgcaacctccaccctccaggttccagcaattctgctgcctcagcctcccaagtagctgggattacaggcatgcgccaccacgcccggatacttttgtatttttagtagagacggggtttcaccacgttggccaaactcctgacctcaggtgatccgcctgcctcggcctccaaaagtgctgggattacaggcacgagccactgcacccaagctctgctcccaattcttgacctcttacatcagatttggcacaaaactgtcccatgccccacatattaaatgatcctatttatatgaactgcccaggcaaatccaataagacacaaagtggagtagtggttgccaggtgctaggggaattgaggggtgatggctgaaggataaggtttctttttggggtgataaaaatattctaaaatgggttgtgatgatagttacccaactctgtgaatataacaaaaaccactgaattgtaataccataaatgggtgaattgtatgtatcccaaaaaagctgttaccaccatcccccaggttctccaaaatgaaacatccttcccatagcgggcatcagacacagaataaacccgagcaggccctgtgtgatcggacttcccctcccatccccagtcccactctgaaccatctcgaacccccttctgcttactctgttccagccacactggccttcttgcaagttctgcctcagggcctttgcacttgctgttccatcggctagaatcctctctctggttaactcggctagcagagtgtgattttgaccttaacaaaaccaatctcccctcccctcccctcccctctcctttcctttcctttcttcttttgagacaggtttcaccatgttggacagactggtcttgaacacctgggctcaagtgatccgtccacctcgttctcccaaagtgttgggattacaggtgtgaaccatcatgctcggcccaaattcttttcttttctttttttttttttttttgggacaaaaagagtctcactctgtcgcccagactggagtacagtggcactatctcggctcactgcaacccagcctcctgggttcaagtgattctcatgcctcagcctcctgagtagctgggattatcggtgcccaacaccacacttggctaatttttgtacttttagtagagatggggttttgtcacgttggctaggctggtcttgaactcctgatctcaagtgatctgccaccttggcctcctaaaatgctgggattatagatgtgagccactgcgcccagcccccagttcttacatagacaccatataagtggcaggcagaataatagcacgccctaaatgtccacatcctcatctccggaacctgtagatgtgttgtcttacacagtaaaagggactttacagttgtgattacagtccgggtcttgatatggggagatgatcctagattatccaggtgggacgaatgtaaccacaggtgtccttatcagtaaaagcaagcggcaggaaaatcagtcagagccagagagagagagactggaagatgctccgcagctggcttgaaggatgaaggatagggttacatgccaagaacaggaggcaacttctagaggctggaaaaggcagggaaggattctctcctagatggtccagacagctctgctgacaacttgattttagcccactgaaacccatttcagatttcattgagaataaaattgtgttgttttaagccgctaagtttgtgataatttgttacagcagcaataaaaaactaacatgctagtttatatttataaaaagaggctgagcaccatggttcaggcttgcaatcccagcaatttggaggctgaggcgggcggaccatttgagctcaggagttcgagaccagcctggccaacatggtgaaaccccgtctctactaaaaatacaaaaattagccgggcatggtggcaggcgcctgtagtcccagttactcgggaggctgaggcaggagaatcacttgagcctgggaggtagaggtggcagtgagccaagattgtgccattgcactccagcctggggagtgacagaataagaccctgtcaaaaagaaaggaaggaaggaaggaaagaaactgacaggggccagggtgttctcagcttgcgaaggatgccaggcataggtgtggccagcagcccccacactctgctctcagtgggcatcgggggccccttaacttcagagggccctagaaacactcaggggtggcttctatcatcacaatggccagaaggccacttctggcacttggtgggtggaagtcaaaagtccatccacttctggagcagcctcacaatgagggattgtcctggcccaaatgccagcagtgctgttgccaagaaacacaaatcatcaagcccagtgcctacatttccaacaaccaccggggcgagcagataaaaatgagggttctggagctacccacctggcttcaaaactggctcaaaacaaacctggcttggctactgactagctacagaccttggtcaagtcgtcttttttttttagatggagtctcgctctgttgcccaggctggaatgcagtggcacaatctcggctcactgcaacctctgcctcccgggttcaagcaattctcctgcctcagcctcctgagtagctgggattacaggtgcatgccaccatgcccagctaatttttatatttttagtagagacagggtttcaccatgttggccaggatggtctcaatctcttgacccgcctcagcctcccaaagtgctgggattacaggcgtgagccgctgcgcccagcctggtcaagtcttttaatgttcctgaaacattcctggaacaatgttctcacttggaaaatggggataataacagtcctgtccttggccggatagagtggctcacgcctgtaatcccagaactctgggaggccaaggcaggaagatcacttgagccaggagatcactccagcctgggcaacagagcaagactccatctcaaaaaaaaaaaacttagctgggcatggtggcacgcacctgtaatctcagctactttggaggctgaggcaggagaatcacttgaaactgggaggcagaggttgcagtgagccgagctagcgctattgcactccagcctgggcaaaaagagcgaaactccatctcaaaaaaaaaaaaaaaaattaaccaggtatggtggcacacatctgtagtcccagctacttgggaggctgaggtgggaggatcaactgagcccaggaggtcaaggcggcagtgagccatgatcctgccactgcactccagcctgggcaatagagtgagaccatgtctcaaaaaaaaaaaaaatagtcccagacttataatctagtgagctttaagtaaggtaagacatgtcaattgcttagaacaatgcctgggagagggtgagtgcccttcagcattagctgagtattgttattttagtagcaagtgcctggaatctaaacccatcaccccttccagcctgggggcccttggtgagcaggagcaggtctgaagagcacctgggtgtctcaccttgctcagcacaatgaggggcgtttgttgactgactgactgatggactgaaggcaaggcatcctaggtatctggttcccaggggagacaggcaagggctcaaagacggcaaggccaggcaggaccacaggtttattggggactccacgcacagacgcttatggcatcacacgacaacggcacggttactcgggacacacacggtggcctctgcccacagccagggcccagaggcagtggggtgcagtctcctcccttgtggcccagacccagctgggtcccttcctcctaggcagctgagggaaggactgctgggttggccacgggcctgggaaggggaagcgagcaggcgagtccaggaggggccggggccggggtggggctcgcctgccctcactccagggactgtagcatcagcagctgtttcagcaccttcgtctggctggtctctcggatttcgccagccaggaacatctcgtccacgaccgtgtaaacctgtgtgaggggagaccctggggtgagacgaggccccccaggatgctggcccggaccctggaagctggggctctgatgcccctcgagctgggacacagacctcagcagaggctccgggtggctagtgcaccacgggtcccccccgtccccctcctctggctccttcagcctcctcttcaccaggagcctaccttgtagaagttgaacaccaggtccagttcacagacattgtggaaatattcgtttaagacctgggagaggaaggcagagatggtaagagatgggcagggagagagccacacacgcacagagatgggaacaaggtcatcagaaagagacagcaaaaaaagagaccaagggggaggcaggggagagagagagacagtgacagggagagaggcaaggagacacacagagagaaacaaaagcaaagatcgatgcaaagagatggcaaaaggtcaggcgcggtggctcacacctgtaatcccagcactttgggaggctaaggcagaaggatgacttgaagttaggagtgcaagaccagcctggccaacatggtgaaaccccatctctactaaaaatacaaaaattagctgggcatcgtggcgtgtgcctgtaatcccagctactcaagaggctgaggcaggagaatcacttgaacctgggaggtggaggctgcaatgagccaagattgcaccactgcactccagcctgggcgacagaacaagactccgtctcaaaaaaaaaaaaaaaaaaaaaaaaaaaaaaagaaaaagaaaaaaaagaaatggagagggagagtcccagtcactgcagagggagggctcaggagggaccagggagggttcccaggccttgggggccactccagggctgcccacccgcctccccaccttacatccctctcccgccgtacctccacgaagttgtgaatggcctccaggtaagccaggttgttgtcattgacatccacacagatgcagaagtagaggccagcatagcggcggtaaatgatcttaaagttccggaactgcagaacagagaggctgtcagcaacggagattgccaggacctaacgtgccagacagagtggggccaaaacattcactccttcactccatacgtggtcccgaggcccagctctgtgcctggccctgtgctggggtcacagcagtgaccgagacagccctaaccctgctcacagtgcagcgggggcaggcatccccagaatggacaggatgggctgtgagagcccaaagagggtgcctaaccccctctgatcctggagagtcaggagggcttcctggaggagggggtatcggagctgagagctggaggataggcaggaatgttctaagcagatagcaaaagcccggggctgggcgggagcctgacgtgttcaatagtgtccatgcaaccttgccactcccttctgtgacttcctgctacctctggagacagtcacatcccttagcctggaattaattaactcaattatttaacaaatacttcctgagcagctactctatgccaggcctgtgataggcagtgtggggaggagggttaccactgccaccaagacgatcctgggtccttgtcctgccctcactgaaatgcgatatacacagttagcaatagtaacacagacacacaccgtgaacaaacatgccaggatcagggacatggattctcattttatgcgcgtgttaagtagacaaagacagatatatatgcatactgggttgcaaagtacaatgtctttggccaaaacctgaaaatccagttcagttctatatgttctcaatgtcaggttcattacaaaaaaaaaaaaaaaaaaaatcccagcactccaggaggccgggcgagaggatcacttgagcccaggagtttcaggccagcttgggcaacatggtgaaaccccatctatacaaaagtacaaaacttagctgggtatggtggcgtgtacctgtggtcccagctactcgggaggctgaggtggggagatgacctgagcctgggaggtcaaagctgctgtgagccacgttcccatcactgcactccagcccgggagaccctgtctcaaaaaacacaaaaaaacagcagctctaggtctggggtgtgcctgtgtcgccacctgctgacagctatgagtgccagcatcagtcttcggcatttttttttttttttttttttgagtctggctctgacgcccaggctggagagcagtggctcgatctcggctcactgcaatctctgcctcttgggttcaagcgattctcctgcctcagtctcccgagtagctgggattacaggcgcgccaccacacccagctaatagctttttactcattttttcagctcaatctcttgttcattgctatactccaagcatgttttcagggttttttttgttttttggtttttttgagacagtctcactctgtcgcccaggccagagtgcagcggcgcaatcttggctcactgcaacctctgcctcccaggttcaagcaattctcctgcctcagcctcctgagtagctaggaatacaggtgtgcaccaccacgcctggctaatttttgtatttttagtagagatgaggttttaccatgttggccaggctggtctccaactcctgacctcagatgatccacctgcctctgcctcccaaagtgctgggattacaggcgtgagcccagcctgagtatgttttctggtgtgattacagtaaggcctacatgtaatccacgggtaaatgagctgacactgatcatcagtgctcctctcttcttgcaatccagcttttctggctctcaccctcctccgcctccagctactgctccatctttccagcctcccttcctgttttaaatttcgaggcttctcagggatctgctgcagacccccatctctcctccagctacattctctcagagaagcacattctctcatcctgcaggctggggcaggtgtcccctctgaacatcccacgccactgccccacccctgccctgccccagcctgaccactgctggtcgccactgtctggggatgggtctgtctccccattggactgagcctgtgggggaagctggagctgtcacactgtgtcctccatgttgccctgcaaagggctggcacaggtaatggcccccaaagacatccacatcctaatcccacaccctgtgaatatgggaccttatatggcaaaaagggactctgcagtctcaacttgtgacgaagttaagaagcatgagatggggcgataatcctggatggttcaggcgggaccaatgtcctcactgggctgctaataaaggaaagcgggaggcgggacagtgcgagtcagacagagattggacgacggccaggtgccgggcctcatgcctatcatcccagcactttgggaggccaaggcttgatctcaggagttcaagagcagtttaggcaacatatcaagacccatctctataaaacatacaaaaaattagttgggcgtggtggcaggtccctgtagtcccagctactcaggagtctgaggtgggaggatcccttgagcctgggaggcggaggctgcagtgagctatgattgcaccactgcactccggcctggggcacagagtgagaccctgtctcaaataataataataataacaagagggatagcccgcatcttccagttgcctactcctccctttgatcttcactcacaagtcccctccaggaagccctccagacccccaggctgggtcaggtgccctcccccagccaggctcctcgatcccagccctgcctactgtggttgtcactgtctaggacaggcttgtgttccttcctgggctatgagtcccaaagcagcacaaggctgtctcagtgctgctgtgaacctagcactgggctgatcacagaggaggcacacagaaacattaggtgaatacatgcacaaaggaacaactgaatgaatgggcgggcctggatcctggaggcatggaggaactcaagacctgagggtcagcctcctctgtaacattctcatttgcccagccggactttccggctgcccctgtatcattgggcctcactgacccctcccgcgccccagccctcagcacaggaccagccactacattagcagcaaggtgcccacacagccagaacacccgacacccagttcctctcccccttcccacctgctgctcttggtgacaccaccagtgacctcctcctggagaggtaagtccaaccctgtccccctcctggctgctgggacacccaatctcttggttctcctctccctcatctctctgcctgcagacgtggccctctggtgctctcctcggtctatcctcacttccccggtgagctccttggcctcggtttccctctatgtgcagaaatgccgtttccatatcctacccagctctctccaagaaccctgactcgtcacttcttcctggacatctctgctgggatgtggacgatactcggggccagacccccaacacttccctcctgatcttcacctccgcctgcccttcccatctgcccatatcagataatgacagctccatcctacccgggggctcaagtgggaaatctaattgtcgccctggctctgctttctctcacattccacatccaattcttggccattcagctgggtccacctccaaaacgctcctggccacaccgacggcttccatgctggtccggtcaccagcatctcccacctggaccactgcagccacctctctccgagcagtctcctctatgctcttgccctatagcgcagcctcaagtcggccaatggccatgctctgctcaaaaccctccatggttcaagaccagcctggacaacatagcaataccccatctctacgaaaaatttaaaaattagccaggcgtggtcactcatggctgtaatcctaggactttgggaagctgcggtgggcggatcgctggagctcaggagttcgagaccagcctgggcaacatggcgaaaccctgtctctaccaaaaatacaaaaattagtacggcattggtggcacatgccaatggtcccagctactcgggaggctgaggtgggagaattgcttgaccccgagaggcagaggttgcagtgagctgagatcgcaccactgcactctagcctaggtaacagagtgagaacccacctgaaaagaaaaaaaaatttaaaaattagatgggcatggaggtgcatgcctgtagtcccagccacttggcaagctgaggtgggaggcttgcttgagcctgggagggtacagtgagctgtaattgcaccactgtactctagcctgggagacagagcaagaccgtgtctctaaaaaacaccaaaaaacaaaaacaacctttcttttttttttgagaggagtcttgttctgttgcccaggctggagtgcaatggcacgatctcggctcactgcaacctctgcctcctggattcaagcgattctcctgcttcagcctcccgagtagctgggactacaggcacccacgaccaggcccggctaatttttgtatttttagtagagacgagatttcatcatgttggtcaggctggtctcctgaccttgtgatccacccaccttggcctcccaaagtgctgggattacaggagtgagccaccgcgcccggccggcaaaaacaacttttctacggctcccatctgactcatagtaagagcccaagtcttccctgcagccctgcaccaagagattaccctgttatcttctctctttcatctcctccccttcctggctgcattcctgctatccctggaacgccctaagtattctcctgccccagggactttacacttgctgttcccttggcttgaaatgttcctctcagacattggctccttcctccccgtcaagtccttcaggtcttggctccaatgtcaccttttcagcaatgccatcctaaccaaaccatttaaacctgcatcctggctgggcgcagtggctcatgcctgtaatcccagcactttgggaggccgaagcaggcagatcacttgagctcaagagtttgagaccagcctgggcaacatggtgagaccccatcgctaccaaaaatacaaatattagctgggcttggtagtgcacaagcctgtagtcccagctactcaggaggctgaggtgggagggtagcttgaacataggaagtcaaggctgctgtgagccatgttcgtgccactgcactcccgcctgggtgacagaatgagctcctgtttcaaaaaaaattttttaaagagggacaggcatggtggctcacgcctgtaatcccagcactttgggaggccaaggcgggtggatcacttgagatcaggaggtcaagaccagtctgaccaacatggtgaaaccccatctctactaaaaatacaaaaattagccaggcgtggtggcgagcacctgtaatcccagctcctagggaggctgaggcagagaatagcttgaaccctggaggaggttgcagtgagccaagattgcccccattgcactccagcctgggtgactgagacagactccatttcagaaaaaaaaaaaaaaaaaggcaaaaaaggccaggcgcagtggctcatgcctgtaatcccagcactttggaaggccgaggagggtggattacaaggtcaggagttcgagaccagcctggccaacatggtgaaacctcgtctctaccaaaaatacaaaattagcctggtgttgtggtgcacgcctgtaatcccagctatttgggaggctgaggcaggagaattgcttgaacctgggaggtggaggttgcagtgagctgagatcatgccactgcactccagcctgggtgacagagtaagactctgtctcaaaaaaagtaattaattaattaattaattaattaattcaattcaatcaaataaaaaataaagacaaggtcttgctacattgcccaggctggtcttgaacacctgggctcaagcaatcctcccaccttggcttcccaaagtgctgggattacaggcatgagccactgcacctggcctattctctctacttttctgtgtttgaacattctataggaagtttgaaaaacgcaccagcaaaaaaaatttgaccaaaaaaaaaaattcttttttaatcgtaggcaaaaaaaattaataataacaatgcagaacaaaaaggcaaaatattaatactgattaaatctgggtagtaggtatacgaatctccaatctacttttctttcattgtactaatctgtatgtttatgatttttcacaatgaaaagtacaagtaaaggaagggaagaagcaagcaagctcaaagcaggttgagtgaatgatataggatggatagagggtccaaggggttcttgcaactagaagctgggcagggagtggcgaagtagggcacgaggaagcagcggggtgcaggaggcatggagcgggcgtcacctccacaaagttggtgtgtttggcgtctcggacggtgaccacggcatgcacctcctcgatcagcttctgtttctcatcatcatcaaactgcatgtaccacttggccaggcgcgtcttgcctgcccggttctggatgaggataaagcggatctgggggcagcaggaggagaaggaggaagtgagagaggcagagagggcgggttgggtgctgcccaacggccccacccatccacccagaggggagatagggctcagggcctccctgctgcctgacttccaggggtctcggctgctccccagacccaagccaggccggcctggccacacgcttcatcccgggtccctccagcacccctgtggagtgacttcccttccacaagtctccaactctggagtcagctccagggccccgagtcccaggctcctccaccacctcttatctctctctgtttttttttttttttttttttgtagagacagagtcttgctacgttgctggtctcaaactcctggactcaagcaattctcccacctcggcctcccaaactgctgggatcacaggtgtgagccactgtgccctgctttgtctgcccctctaggcctgtttcctcaccagcaaaacaagtctcccaagaagattcatctcaccagggtggttttttcattatattttttgttatttttaaattttcagacagtgtctcattctgtcacccaggctggagtgcgatggcgcaatctcggctcactgcaacctccgcctcccaggttcaagcgattctcctgcctcagtgtcctgagtagctgggactacaggcacccgccaccacgcctggaaaatgtttgtatttttggtagagacggggtttcaccatgttggccaggctggtctcaaacttctgacctcaggtgatccgcccgcctctgcctcccaaagtgtggggttataggcatgggccaccacgcccagtcagccagggtttttttaaaggttaaaaaaaaagtttataaacttagttcggtggctggtaggtggtagatactcaataaacatttgaggttcagactcctttgggctaagtctcagctctgccacttctttttttctctttgcttcctaactttttataaaattgaaatgtaattcacacaccataaaatccatccacttaaaatgtagacagttaaatggtttttggtatattcacttagtatatattcacagttgtgtaaaaatcaccacttttttttttttttttgagacaggttctagctctgttgcccaggctagagtgcagtggcgcgatcccgcctcactgcaacctccacctcctgggtgcaggcctcccaggtagctgggaccgcaggtgcacaccaccacgcccagctaactttttgtatttttagtagagacagtgtttcaccatgttgtccaggctggtctcgaactcctggcctcaagcgatccacccacctcatccccccaaagtgctgcatcaggcgtgagccactgcaccccacctaatatcaccactatctaatttattatctaataccagaacattttcatcatctccccccaaaaaactccccacccattagcagtcactctccgttcccccagggcctggcagccacgagtctcctttctgtctctgtggatgtgtctgttctggacattgtatatgagtggaatcatgcactctgtggctttcgtgtctggcttccttcactcagcgtgacgttttccaggctcatctgtggggtggcaagcggcagagctgcaattcctttccgtggctgagtgatcctctgttggatggataaggccgtacttcgggcatttgggttgtttctgctttagggctattatgaataatactgctatgaacattcgtgtatgagttttcgtgtggatggatcatttctcttgggtatatacctaagagtgagattgctggctcatagggtaacgctatgtttaactttctcaggaattgctaaaccgttttccaaagcgtctgccactttcatgacttaactttggtgccactttggtgcctgagtttactgtgaggagtaaaggatattcctggccggtcacggtggctcacacctgtaatcccagcactttgggaggccaaggcgggcagatcacttgaggtcaggagttcgagaccagtttggccaacatggtgaaaccccatctgtactaaaaatacaaaaattagccaggtgtgatggggggcaggggggaggcggctataatcccagctactcgggaggctgaggcatgagaatcacttgaacccaggaggcagaggttgcagtgagctgacattgcaccattgctctccagcctgggtgacagagcgagacgctgtctcaaaaaaacaaaaacaaaaacatagaggtatagtacagtgactggcacgtactaagtgttacataagaaccagctcttagcagcattatattttccattatgtgatgttcagaaaaccatggccaaagcttactccattagaagttctgggcccatttctgtctgagacaggcatgctcatgcccattttatagatgaggaaactgagatttagggaaaggaagtctcacagccagaaagcagaggtgggagtccaaaggctttgctctgaaccacctgaccccaacttgtgggagccttctctcttaggaaagagagccctctagtcctgtctttttcttttcttttttgttttcagacagtctcactctgttgcctaggctggagtgcagtggcactgtctcggttcactgcaacctctacctccaggttcaagcgattctcctgcctcagcctcctaagtacctgggattacaggcgcatgccaccatgcccggctaatttttgtatttttagtagagacagggtttcaccatgttggtcaggctggtctcgaactcctgaccttgtgatctgcctgcctcagcctcccaaagtgctggggttacaggcgcgagtcactgtgcccagccttttttttttttttttttttgagacagagtctcactctgtcgcctaggccagtggcacaatctcggctcactgcagcctctgcctcccgggttcaagcgattctcctgcctcagcctcccaagtagctgggattacaggcatccaccaccacacctggcttatttttgtatttttagtagagacggggtctcaccacgttggccaggctggtctcgaactcctgaccttatgtgatccgcctgcctcagcctcccaaagtgctgggattacaggcatgagtcaccgccccagcctgagagtctttcctaagcctcattctccacacactctatcctccctcccccaaccaaccaaactggaccggaacaggatgttacactctccttccaagaactcctgctgagccagggaaaaccacttcctagcagggcaggggtcccaggcaggaagggacgttggggggcctacaccaggcagccacagcctgggagcagagccggagacatattcacacagttaggagaactagaagcaaacccacagagttgacaaaaagctctgcctcttactcccaaattcccttgtatacctctccctgttttcttcccatttggaatctcaagtcccctccgtcctgaatctctgcatcctcacgcctctgctgtcccctctagatgccccccaaccttccctgtctccaatccccctcctctggagttgttcccttttgacctccactttctcagtctcagttcccctccttggggcctcaatgggctttttactggtgacatcccttgtcccactcccaagcttcctcccttcttcaaaaggtcacattttgcctccaaggaccctgttcctggaggagactccgcccccgctctgacactctttctcattcgttttctttcccaacttccagcccaaagaaccctttcctagatccaaagccccaacctgggggataggggcactcctaaatccaatgttgagtctttgccccaacaaagattcctccccaggtctcacactttcaagcctactccccaccccacaagatctctcctcttggaaagacctattcagttgctccccattctttccgagtgtccatcttacctccaggtcctctctccttttacagcgctttcccagacccttaagtttcattccctacagttgcctccttttggtttcctgtgccaggtctcttcttgagatcatccctctctcacaggcagtctcctgcccctgtctcaacatcccctctccacctgcaatcagatccttgtctctagagactcctcccatcaagaaaacctccctccccttttccaaggtctcgcgttctcgtcccagcgctcccgccacacttccagagcgccttcctctttcggacgccctctccccacctccaatgccttctcgctacccacaagactgtgtctcacgagtttcctctcgtttcaaagcttccaaccatctacaacgtttcccacctgcacagccctttccccttggaacaccacccccaatgcccgtcgccgcgagacccctggtaacccccgcgcgcagaatcaccgccctgtgccctccttcccggccctggatcggtcccaatccccagagcccgcgcctgacccagaccatccgcggcagagaagggacttgtcagcgcccgatccagcctcggctatttacgcgtgggccccccctccgccagtccccggcgtagcgctcccccgttaccatggcgacccccgtccagaccccagcggccccggtcccgcggcgactgggcagctccggctcagggtgcagttgtagggcccagagctagagcggacttccggtagaaaaacccgcctgccttctcgcgcacagacccctgggagttgtagtttcaccaaaggggccagcctgggtgaagatgggtgaagagtcagagccagtccttttcctaccaaacgagtcagatcccaagtgcatgctgggatttgtggacaaacatctttacagaggactacaattcccgagatgctgaagaaccagcggtgaaggcgttgcattcagggaaatgtagttctcttaggtcccctccccccacccaggggagaagggcatgctgggaatagtagttttaaattttaaaaaactgtcctggggagatagaaaatgtctttccattcctcatccagtgatttctttaatttttttaaaaatagagacaggggtctagatatattgcctaggttgatctcgaactcagcttcaagcgaccctcagccttccaaatcaccaggattacaggcatgagccaccacaacaccaagccagtgttttgcttaaaatacgttgcgtgtgtctctcgggagacaacagtttaaaagcataaatttgaaccggcccggcgcggtggcttactcctgtaatcccagcactttgggagtccgaggcaggcagatcacttggttaggagttcgagaccagcctagccagcatggcgaaaccccatctctactaaaaatacaaaaaattagccaggcatggtggtgcgcacctgtagtcccagctactcgggaggctgaggcaggagaatcacttgaagcccggaggcagaggttgcagtgagcccagatctcgccactgcactccagcctgggcaatagagagagactccaaaaaaaaaaaaaaatctctagtttggcgggggcatgatggcccatgcttgtaatcccagcactttgagaagctgaggtgggtggatcacctaaggtcaggacttcgagaccagcatggccaacacggtgaaaccatttctactaaaaatataaaaattagctgggtgtgatggcaggtgcctgtaatcccagcaactcgggaagctgaggcaggagaattgcttgaacctgggaggcagaggttgcagtgagccgagatcacaccattgcaccctagctggaatgacaagagcgaaactctgtcaaaaaaaaaaaaaaccctccaggtcagcagttagtttagtgtttttttggtgtgtctttgtttttgcttttttctgaaagagggtctcccttggtcacccaggctgtagcgcagtggcatgatctcagctcactgaagcctcaacctgctgggctcaagtgatcctcccacttcagcctcccgagtagctgagactacatacacatgccgtcacacctggctaattttttgtactttttgtagagacagggtcttgctatgttgcctaggctgctcttgaactcctgagctcaagcgatcctccctcctccacctcccaaagtattgagattacaggcgtgattttttaaatggcctttattacattttaaaaattattttatttgccctatgagtatgtgtgtatgtttgtctagatctctcattaggtagtgagttgttgagggcagggaccctgtctgataactgtatcttcattacctagaacatgacagatggtaagcagtcaataaagttattactattagtactgaggggagattggccctaataagaacaaagcatgccaggcatggtggctcactccagtaatctcagcactttggaatgccaaggcaggcagatcacctgaggtcaggagttcgagaccagcctgcccaacgtggcgaaacagcacctctaataaaaatacaaaaattggccgggcttggtagcacttgcctgtaataccagctacttgggaggctgaggcaggagaagcacttgaaccctggagatggaggttgcagtgagccgagatcgtgccactgcactccagcctgggggacagagagagagagagactccatttcaaagaaataataataataaattaaataaataaaacaaaatgtattgtagaattatgtaaatttaaggtatagtactggcagaataaccaacacatagttgttgaatattataggggcaaaaagaggccagagatcatttctgtcttgtgtacttttctgtctccaacagggttgatactaggatgacacaagcaaagtgtccaggttgcaaaattttaaaaggacctcactcttagatgccaattcctgtcttacacaggactgagaatatgtgcctcattaaattttgtgccctcaacacgtcacttgcctccccttagtcccagtcctgatctccagtgttcaacttaatacttggcacaactctggtgttcaataaacatttgctgaatgaatgaatgcatttgcagcaagaaaacagacactgcccccaccctcacagcattcacagtctagcaggaaaaatggacttaaatgacataacataaataaatttaaggccaggtgcagtggctcatgcctataatcccagcactttgggaggccgaggtgggtggatcacctgaggttgggagttcaacagcaacctggccaacatggtgaaaccccatctctattaaaaggacaaaaattagccgggcatggtagcgtgtgactgtactcccagctacttgggaggctgaggcacgagaatcacttgaacccgggaggcagaggttgttgtgaactgagagtgtgccacttcactccagcctgggcaacagagtgaaactctgtctcaaaaaaaaaaaaaaaaaaaaaaaagaaggccaggcagagccaagtggatcacctgaggtcaggagctcaagaccagcctgatcaatatggtaaaaccccatctctactaaaaacacaaaaattagccaggcatggtggtgtgcaactgtagtcccagctgctagagaggctaaacaggagaactgcttgaacccaggaggcagaggttgcagtgagccaagatcgcgccactgcattccagcctgggctacagagcgagactccatctcaaaaaaaaaaaaaaaaaaaaaaaaaagatattagccagtgctacagccacgagaacactatctttttttctttctttcttttctgagacagggtctcgcactataacccaggctggcatgcagtggtgcaatcacagctcattgcagtttcaacctccggggctcaagcaatcctcccacctcagcctcctgagtagtgggaactacaggcacgtgccaccatgcccagctaatttttaaattttttggaaagaagaggtcttgctatattttccaggctggcatgtgaatgcttgactggagctgaaggacctgtattccaggtggctcgctcctgtggttggcaaatgaatgctggctattggccagagacctcagctcctcaccacgtgaatctgtccacaaggacatatgaatgtcctcacatggcagctgttttcccaaagagtgagtgatctaagaaagagcatggcggaagctgctatgtcttttatggccttgcctcagatcttttatgacactgtcatttccacaatgttccattggtacctaatcagccctgtccaatgcaggaggcaatgcaaataccaggtgagactcattggggtccatcttggaggctggctgccacaatggctcataacaggcacctagctgagttgaagagttagtgacagcttcctagaaggggtgacatttgagctgagatcagaaggacgagtggagccgggcatggtggtgcatgcctgtaatcccagctactcggaaggctgaggcaggagaatcacttgaacctgggaggcagaggttgcagtgagccgagattgtgccactgcactccagcctgggcgacaggctgctccgtctcaaataaataaataaacaaacaaataaataaataaataaataaaggccaggcgcagtggctcatgcctctgatcctaccactttgagaggccaaggtgggcggatcacttgaggacaggagtttgacaccagcctggacaacatggtgaaagcccgtctctactaaaaatacaaaaattagttgggtgtggtggtgcacgcctgtaatcccagctacttgggaggctgaggcaagagaatcgcttgaatccgggaagcagagattgcagtgagccgagatggcgctgctgcactccagcctccgcgacagggcaagcctccttctcaaaaaaaaaaaaaaaaaaaaaaaaaaaaaaaaagacgagtggaaattaaccaagcaaggattagtgtccaggatggggcagagtgctgggcagaagaacacaggtagggagaagatcaaaacattttctctaccctcaggagtctcatggcttgagtggtttcgagtctggggctacatggcacagacatagaaaagataagtcccgaaggaacaattatttatttttttattttgctagacagggtctggaactcctcctggcctcaagtgatcctcctcccttagcctcctaacgtgctggaattacagtcgcgagccagcgcgcccggcctcaattttaaacgtttataaagatagagaggttgtggcagggcgcggtggctcacgcccgtaatcctagcactttgggaggccggagcaggtggattgcctgagctcaggagtttaagaccaccctgggcaatatgacaaaaccccgtctctaataaaactacaaaaaatcagcgcgcctgtagtcccagctgtttgggaggctgaggcacgagaatcgcttgaatccggaaggcggaggttgcagtcaacggagatcacgccctgcactccagtctggacgacagagcgagactgtctcaaggaaaaaaaaaagagagagagagagaaagagagagaggttggctgttcgcggtggctcacgcctgtaatcccagcactttgggaggccgaagtggaccgatcacttcagcccaggagttcgagaccagccggagcaacatggcgaggccctgtctctacaaaaaatataaaaattagccgtgtgcactggcgcacgcctatagtcccagatactccggaggctgaggtgggaggatcccttcagctggggaggaagagcttgcagtaggctatgattgcaccactgcactccagcctgggcgacagagcgagaccctgtctcaaattttttttaaaaaatagatgtttattatgcattcatccagtagatatttagtgcgtcgatctactaagcaaggggcccaggcactgggattccgcggtgaatctgagcatccccgcctcccgttcctgcctcgtgattggctgcccttgggccaatggctgaagagtccaccgctctgccagcccccgcggcaatcctccagctgcagcttcccctgttcggtttgcaggcggcgctgtgggctcactgactcctccgtcacacgcagacctggtccccaccctctctgattctttcagactcttaggaatgaatagagtgtataccccagagtcccaccctctttacaaaatccttttgtgaatttttctgcctgtgcaggtttccaatacaggtccagaatcccacgcccgcctcttatcaaccaacaccagcggctctcccgttaatgtgacctccagccattcggcccgtaggccgatgcttgggaaatcttgacagcggcccaagccggcagtcggcacttctctcggtcggttaattgtttactcgtttgtttatttatcctggagtggaggctagccgggtgcgcggaggcggctgcccccagggaagcccgcttcctgtggttggcttgctcaactactatccgccctcttgcgcactggaaaaaattgcagagctgggaatgcaccccttgatggttccgttcatgcagtaaaacaatgcctgggcccctgccttgtgcctggatccgtgctagggacatcgacgatgactgaaacagccctggccctgccctcaggggccttgcagtccgatgggaaagacctatcaccagatatggaccacccaaggtggccagggcttggacgggagacctaaagggactgtgggagcttggaaggagcagctgacccagcctgttgcatcagagaaggcctcctggaagaggggacatctgagctagcatctcaaagaaggctagaaggacaaccatgtagtctctggctaccatgtccccagtgcctaccacccccttgtttagcattggatttttttttttttttttttttttttttttgagacggagtctccttctgtcacccaggctggagtgcagtggtgcgattttggctcactgcaatctccatctcccgggttcaagcgattctcctgcttcagcctccctagtagctgggattataggcgtgcaccactatgcctggctgatttttgtacgttttgtagagacagggtttcgccacgttgtccaggctggtttcgaactcctggcctcaagcaatccacccgcctcagccttccaaagtgctgggattacaggcctgagctactgtgcctggccgactcattcacttttatttattaacaagttttaattgtgggtcattggccagactttggaactagccagggtcccctgccttcagagggctcacacataaaatggtgataccaacacagaacttcatttaatctttttagagacagggtctggccttgtggcccaggctggagtgcagtggcacaatcatagctcactgaagccttgaactcctgggcttaagtgatctttcttcctcagtctcctaaagtgctgggatccaacacagaactgcaaaccttgaaccctgaagaaatgctacgtgtagcaacgtgacccaattgtctgggtttgtgtctcaaacctgctgcttactagctgtgtaacttttctgtaccttataacttactcataaggttgttgtgaggattcagtgagttaatgggtctaaagtgcttttagactgctgcctggcatgtccaggcatggcggctcatgcctgtaaactcagcgttttgggaggctgaggcaggaggcctgcttgaggccaggagtttgagaccaccctgggcaacatagcaagactccatctctaccaaaagaaaaaaaaaattggccaagtgtcatggtgagagcatgtagttccagctgctcaggaggattgcttgagcccaggaagttgaggctgcagtgagccatgactggtccactgcactccagcctgggcaacagagcaagaccctgtctcaaaaaaaaaaaaaaaatccacacacaaaaaaaaacaaataaaaagaatgttgactagcctggccaacatagtgaaaccccgtctctattaaaaatacaaaaatttgccaggtgtggtggcacacacctgtagtcccagctactcgggaggctgaggcagaaaaatcgcttgaacctgggaggtggaggttgcagtgagccgagacctcgccattgcactccaacttggatgccagagtgagactccatctcaaaaaacaaacaaacaaacaaacaaaaaagactgttgcggccaggctcagtggctcacacctgtaatcccagcactttgggaggctgaggtgggtggatggcttgaggccaggacttcgggaccagcctggcccgaacaggtgaaaccctgtccctactaaaaatacaaaaattagccagatgtggcgcctgtagtcccagctactcaggaggctgaggcagaagaatcacttgaacccgggaggtggaggttgcagtgagccgagatcacaccactgcactccagcctgggtgacagaacaagactctgtcttgagaaaacaacaaaaacaaaaattagcggggcgcacgctggtaatcccagactctgcctcaaaataaaaaataaaaataaaaaaagactgttgcttggcacgaagtactcatttttattattaaagaacgagggatcaggccaaatctgggagactaccctgagaaggtgacttcaagctgagagttgaagggtaaatcagagctgatgggctcccaaggggtttgggggatccagagtgagcccaagcgtccttgttctccagatgctgccagctcacaaatttaagattgaaaagactcggaacactgcataggcgttgtaaagacattaatttgaaatacaggtatcaggaattcactgccccccaccttgtctttcctgtgtctcctcaagtaatctcaaaagtcccttacacatcacggtttgtaatgacagtccacgcactcgatttggcagccccgcagtgcttaaagaaaagttgttgttgtttcaagccactaacatctaaaaatcagactgaatgcattaaaagtgcctttttttttttttttttgagacggagtttccctctgctgcccaggctggagtccagtgctatctctgctcactgcaacctccgcttcccgagttcaagcgattctcctgcctcagcctcccgagtagctgggattacaggcgcccgtcacgacgcccacctcatttttgtatttttagtagagacggggtttcatgttggccaggctggtctcgaactcctgaccgcaagtgatccgcccgcctcggcctcccaaagtgctgggattacaggcatgagccaccgcgcctggccctaaaagtgctacattaaaaaaaaaaaaaaagtcaatggaaacatcctttaatataaaaatctttattaatggaataaacaagcccctgtaattttatttatcaacgcttacagagcgcttactatgtatgcaatgcatgatttcaagagctttgcaaaatataatctatttaattttcacagcagccctacgagagaggtacgattattatcccattttatagatgaagagactgatggcagaaatgccaaatgtaataggaaacagcctttcttcatgcattccacaaatattggctcggcgcccgggaagctcatcttccacgatctgtacttccggaggagtcccagaggaacacctcctcagttcagaggagtcaagggttacagcggtgccctctcccatcactactcttttcccttcaggcgccctaattgacattcgatttgtagccatttgcacaatgctaagtgacaggcttgggctgcacacaggaccaggccgtcttccctctcctggggatcagtcgttcacagaaccaaaaacaagttgcatggacgcgcgcgttggctgcagattttcttcacagccaggagaaagagcacgcgctctccagccccgcctcttcttccgggacgacgaattgcggggctcggattgggctgaggcgggccacgcctcctcatatcctccaatcaactccctctctggtgcgctccctccttctcagccccgccccaccgccccacgttacgtcgctccttctggcctcctccgttatcccggcggctgcggctcgcgcggcaaacccacctcccattgcttcccattggctggtcaggtcccgcgcgagcgggatcgcgcccttcgccccccacccccaaaaccgggccatgcctctctccttcggctttctccaggagccagcgcgaggcagtagatcggctgcttgagacgcgcgcgcagctcctgcggaccactccctccgccctgcgccagcagctgcgccggctggcagccccccgcgcacgcgcgctcgcccatcccgctccctctgctcgtttgcaagtcgcctcgcgctcagtcgcgacggcggccgccgcaatagcggcattttcgggggcgcacgcgcactgcaccgtccgcggccgttcctaacctcaggcagcggctgtggcagtaagcccctcgggtgcgcacgcgctctgacctcttcccactgcctcgctggttgtcccttcgcggcgcgcgcccaggggccgttatacccctgcaacggtccacgcgccgcgcacgcgcagtagcgagggggcgcgcgcgcgggagcggccgtcgcaggaaggaggtgccgccgctgccgccattgcgagggagggagggagggagggagtgagcgaggctggtccgccctccccctggttgccgcccctccccccttcccctccccgccccccgccccgagggagagccgcggcgcggcggcaggaggaggtggaggaggcggaggagggaacccgcgagggagggtccgcccggccccccgccgccggagccgccgccgccgcctcagccgccgctggactaggagcaggggaacatggcgccggggcccccgtcgttgctgccgggattttggaggccggggccgcgctgagggcgcccagctggtgagtgcgcgagctcacgggccccgggcggcgaggccgggcgccgccccgctgcggggtccagggggaggcggggacggcggggcccggagcccgcgaacaatggaggagctggagggggaggggaggagcggccccccccccagccccccgggccccgccgtccccgtcgcttcgcgcgtcggcccggcccgtggggccctcctgccctttggacctgcccctgcccgccccagccctgctgtccccgccgccgcccccatccccgacccgttgggatctcggtgtctgcctcggagcctacccgacttcagccaaccggttcccaattctgcgccccccttcccccttccacccctccataatgcccttcgctcctcccgggctctgcagtgctcctgggacccatcttctcctcattgaccattctgcatctcttaattgtggctcccacttttgagatccgtgacgcttctccctcttctcgattctgctctcaccacccttcagatctgtcctcggccccttctttgacctaccttctgtgctattattcctgtctcagaatctgttgcaccctgggagctgtccctttaggacctgcggttccaaccctttggagatccatctgagacccctgttcggccaggcactgctgccccaggtcttccccttggactgaatcccgttccctcgtgggccctactacccgcatttcttgtctgccctctcgcagagcctgctgcaccccgggatgcccctcggctggctttctgacccttccgtgccccagctcattcccctgatcccctcggacttggctgcaccgtgcttgcctgttccccttctcagctcttgttcccgtttaccattcagaccctttcctctcttccagacctttctgcctctcagctctgccccttgcccgacctcagatcttgctgcgctcccctcacctgcttgcttctgactctgccttcccgggaagcagcctcctcccccttctctgactctgcaggtctcccatttctgctattcacttaaatgatgtatccctaactcagactgccttcagtttcagcccgtgttctcttggaggtttcctctcttccccacctcctttttggcactcctctgagctactgcattcatttgcttctcctttctttggcctgtctctccttcagttctctgcctgaaaactgcttcctgtcccctctttgctccaattcctctcctccccgttttagcccttagacatgccctttaacctcactatacctctgatacctcccgggctggtcacccatccccttcctgttctgcatctcacagacctgcccctagatccattttgtacctacactttcttctcgtttttttcaattctgctccatcctctttatttagtgtttccctccccagctcggctccttcggagctgtccacttgcccgcatatttttagaccggtttttaacttctgtattgccgtcctttcttggagcggtcctttaacactggggttcttgtcactgtgtcccctctctgttccctcccgagtcttttaagttttccacatgacagtctcttccccccaccattttgattcagccctcacccttcactctgctttatttgcccaccctccactgttctgcctcttgtcttcttttggagttctcactccaattgtgacattacgatgtcttcttaatcattctttcctatgtattcccccccaccttcctcttggagctgcctcagtgctgtgatagattatcactcccctttgatatccctctcccaattctgttcctcttggacttgtttccttcctcaccttttttttttttttccttccccttgtatcctgccaggctccttctcttcccatttagttcctatcagacctgctcctcgcagctcaccacccgtggcccacccattccccattgagcacttcccctttcaggcatatctttctttccatccctctgctgcagaggcaaaggggctggattgggccttaggctctccaggctctgagactgcagattctctctctgcgccctaaccctgagggttctctccccagggatcctgagagatctgggtaaataggtgggggttggttgattgttactactctctggagtctgggagtgtctcccccatttcccccacttccactaggttagtagtgtggggggaggtagatctttttccattgccccattttctttcctctgctgtttgctctctcccttcctatctctgggctttgcagctttgtgtcctttggaaaaggggattgcagctgctcgcagatctttattctctttctcactttccctccttccttctctgagccattgcatagagtaccctctctccccttccacctctaagccagcaaccctaggagtgtccttcccttcccccccgccttcgcccctcccccccagctaacaagttatttcaatatatagttttacctctagctggggaaatgccagttctcaaattatcccgatcccaccaggggttatggccacagttggacctagggaagctacagtattgccttccctaatggcctctggtttgcagtgtgaccttgtgggaggggatggggaaggtgggcttatttctttttcatctttgccccgggaaaggctccagcttcctggtcttcaaaatggtgagggcttgggtttggaaagcactttgcggttgtttgttgaaagagagagtgccaaatgtcactcagatttctgccctctggtattgcaggcactccctgccacaggagctgagtgcctctgggcagatccatgctagattctggggctctttgcctgccgtacaaggggtgtgtgggtgggccctgacattccttaagctttttgagtgacctgattgggtagagttagaaaggggtgccaggaactggcggatgtgattggatttttagtcttattatctgagaaatgcgtcttggctaccattcctgagcgattttctttaatgactctatggttgtgggggggtatttagttcattcaggggtagaggtggtttttacagaaaatctgtccaaccattttccttccttaacttgggaaaggggatcttttgcatgttctaggtttatttattttatttcttaagtaaatcaaaagcctgatttttttccctgctgtggcctagggcaattgtatattaaagtagccatccaactgtgaaggagcatttactggaaggactttcttaactgtgctatgatcaaactttgtttattttagtacttatttagaaataattctgtgtggacacatttgaaataaaaacattcactgtcatctacagagttggaccattcactcatcaaatattagggcatttgtatatgagacagtgaagagggctgatagtagatttgtatggtcccttgaactttttaaaattttctgacagaatctggtaattttaataatctatgtatggcatgggttttcaccattattgacttaaagatttttggttcatttccgttggtaaatttttagccttgtgtgtcatgattaattttctgaatttatcttagagtttgtgttacccatgttggtgtcaatagttgttttgttttttattaatatggaagtgacagataattaagaataaaaacaactgtgtatgcagtactgcttaaatgtgtgtcccagagttttaatatcattggcagcatgaaaagttcctgcatgccaaaagcctaagtttacataatagggagagaggacacacagaatagagagctgatttttccaccttaactggtaaccgatgttcttaaagactgtcagatttctctgaggctagcagaggccctaactccagcattgccatttgctttcatgatgggattgggtgctacagaaatgtgaggtggtagccttggccttctggcacagttaatatgccatttggagtggggggactggagcaggagatggcggtagacaactgctttcaaggtagtaacatgttttcaagggctcttgccctgcctagaaaatctttgtaaagacttaaaaactaatctgatcaaagttcctcatttaagttatcatcttgttttcaactaacctctttttggccatgctccccacccgcccttttacctgcccgccattttccttggcatgatgaaggtcgatgcatttagaacagtgacaaatcagaaaatactcattcttattgatccagaagagaagaagttgaaagaagttgtcggtgtgcagattcatgggcagatccatggacctgatggtgacttttggcaaaggacacagcctgggaagggtgggggttgcacaggtgacagtaaaccatagcctaatagatgtttggtgagtctgcatgtgaggaggtgaggcgtcaggtcaatatagttggagattgaaaaggtcggagtggttgttcgtctccatctagtctggtctgcttcccaactttggtccactgtggtctcctgagaggtgttaggccgcttgcagcgtcttcctgtgatctgctgtgacttttgtcggtcaccacctggcagtctaaacaatgtcttgatttacacagtaatcgtgactttttttgagatggagtttccctcctgttgcccaggctggagtgcaatggcgcaatctcagctcaccacaacctctgcctcctgggttcaagcgattcttctgtgtcagcctcccgagtagctgggattacaggcatgcaccaccacgccaggttaatttttgtatttttagtagagatggggtttcaccatgttggccaggctggtcttgaactcctgacctcaagtgatccacctgcctcggcctcccaaaatgcagagattacaggcacgagctactgcgcctggcctgtttttcccttttttaaaaaatcttttgttattcatcacagcactatccatgatgtccagttggtaagatttctttttcacgatctgtaaaataggtaaaattgagattctttgcatgaagagagaaggtgactagcacaaatacctcctttgacgccttgcgttcattggaactcagtgggaaaatcagcgcgtagtctagcctcctcatttacagatggaggaatggaaggctggcatagggcattgtgacaggcttcctgccacagcagaaaagtactggatttatataagggcagtgacctggcttctgatctaggccttgtcctaattagctgggaccttgaacaaattgcttgacctctctgggcttcaccttcctagtctgaagcctggagtgctgtccaggtctgattgtagattcttgttgtcctgggtcacttaccaagttagagttggagcttaggactaagctcctgttgctactctttgattcctctctcacctgccaatccccaactgcctgtcatcaagtcccgtaacccagagtctgtgtagggggctctttccctgggagatgcagtaaaatgaactggattacctttgttgtatactttttcagatataaaataaacactgcctgtttttcaaccattcacatggagattactttataatttagggggatggggttatccagattatattagctacataactaaaaccatatacctcttttaaaaacgatatggaatttttcaagctgagtcattgttgacctaggctctcaaacagcaatggtctgaacagcacttgtattgctggcattaagaaatgcaaacaaataattcgtgttcatcttcccaaaacttttgatccagtgctttatcaggcttcatctataaagaattcttgaagataacttttggcatctgtcaatctaattttcatttatttgcttctctgatactgagaaatgccattaagttgatatattagcagagaaccagatactttcagccatgaagtatcattacaggaaagtaatatttattttagttgaaaatagccagacttgcctatctctctcatcttcctttattgaaacgaacattttctttttatgtactttgcagcagttgtgactgttgtattatagatctgcaggtatttcctgcctcttttgctctcctgatatctctgcattcttacttggatgatgccctcgtcctggccactgtagtaaactggtaattgcatttggacaattgagaggcggcttcctatgatgtaaagaacattgaagaaacctgggtcctagccctagccctgtcatttactagctttgtgactagccaaatcattttcatttctctggactacagttccttcatttgaaaaatgaagggattatactagttggttcccattctgccttattttgtggctaataatacttgattgtcatctctctctctagatagacagtaaactcctgaggatgaggagcctcttatattatctttgatttcctatcacacctagcaaaaataccttgtacttggtaggcccccattgtgtccatgttgacagaagataaacaggtgctaaagttttttgttgttgttgttgttgttttttttttggagatgtttgtaccaactgtaatggccatttgcaggctttaaatgcttagagggcatgctctcctggtcagcctttttttaaattttttctttttttgagacagagtctcgctctatcgcccaggctggagtgcagtggcgagatctcagctcactacaaagtccgcctcctggattccagcgattcttgtgcctcagcctcccaagtagctgggattacaggcgcacgcccaccatgcccatctagtttttatatttttagtagagacggggttttgccatgttggccagcctggtctcgaactcctgacctcaggtgatccacctgcctcagcctcccaaagtgctgggattacaggtgtgagctaccgcgcctggctctggcccagtatactttaatctgcatacttgctgcattgtaaatttcttgatcatgatgacacagttaataagtagtaagtcagtgtgaagaatccagatctgtctgatttcaaaatttgtttattttattaggctacactgcctctctgggtataagaataagcatagttcatcaccttaaggaatttatggtcaattgtaaacaattaactatatagggtgaagggaagtaaatgttgaatagactattctgattaatgtctggctccttgggatgtgatcctgtattaatagtcttgaagactttcatattcagagatttgagcacacagtaggttccatatcacagtattttgaaaagaatgtacaccacaagtaccagcttgcctttttagccagcatatttggaaaagttgagcattttatgtctgacctgaattcaaacacaggtgtaacaaaactgtgtaagtaaactagtctaacaggaagaaggtagagatgtttggtcatgtaatgactccttaaatctacatttttttcagcaagtagaaaagtatttgggtagctacaaatggagagatttttctttaggcaactaaaaatatatacatagaatatatacaactacaatttgccaatttacaattaaaaaataaaaattaaaagaaacatacagatagaaatacatctttcctcttgagttatttaggtggagctcaccgtgatttttttttttttttttttttttttttttggtgacgtagtcttgctctgtcactcaggctggagcacagtggtaccatctcagctcactacaaccttcaccttccaggttcaagcgattctcctgcttcagcctccgaagtagctgggattacaggcacttgccaccacgcctggctagtttttttgtatttttagcagagtcgggtttcaccatgttggccaggctggtcttgaactcctgacctcatgtgatccacctgccttggcctcccagagtgctgggattacaggcctgagactccacatctggacatgatactttatttagtaactttttgcattttaaaaaaatgttagtctaaaagtatgctggttagttacagctaatagcctcctgaggtgtatatatatagttggccaggcgtggtggctcacgcctgtaatcccagcactttggaaggccaaggtgggcagatcacctaaacgcctaacccccagaggtaaaggctgcagtgagccatgatcgcatcactgcagtcctgcctgggtgatggagtgagaccttgtctcaagaaaaaaaattgtgtgtgtgtgtgtgtgtgtgtgtgtgtgtgtatttgcattgtgtgtgtgtatgtatatagttgcattgtgcttttcccccattttcatttaaaagaaaggtcaaaactgtggctttatctcttgcagcctgcactacttaggaatgagacaaaggaaaatgattaccattaattgccatgggcaattaaaaagagttctttgttcagtaacaaattgattgtgtacaaatgaaagtcagcactgcattaatacaagattattagattcttgaaatcagcatcttctgctagagtagctttcacttcaagggaattatttcactgggaatagcgtacctaaatgattggtgataaaatgtatcactaggtctttatttttcagaaatgcctgttaacgttgtaggtagaggctggtggatgctgcttttatggtaacctttttaatgtcctgaaatcactgtgtactttttttttttttttttttttgaaacagagtcttgctttgtcgcccaggctggagtgcagtggcgccatctcgactcactgcaagctccgccttctgggttcacgccattctcctgcctcagccacccaagtagctgggactacaggcgcccgccaccatgcctggctaatattttgtattttatttagtagagacggggtttcactgtgttagccaggctggtctcgaactcctgactttgtgatccgcccacctctgcctcccaaagtgctgggattacaggcgtgagctaccacgcccggcttgtatactttttttaatgctgtcaatgtataagaaatttcttcttctgggctgggcacggtggctcatgcctgtaatccccagcactttgggaggccgaggcgggtggatcacgaggtcaggagatcgagaccaccgtggctaatacggtgaaatcccatctctactaaaaatacaaaaaattagccgggtgtggtggcgggcgcctgtagtcccagctactcaggaggctgaggtaggagaatggcgtgaacccaggaggcggagcttgcagtgagccgaggtcgtgccactgcactccagcctgggtgacagagcaagactcagtctcaaagaaaaaaaaaaaatttcttcctctgattggtcagtcaactgaggaacgtagataaaacctttgataaatgaggaagaagagaaaaagactcctgactgctgtggagtaggtcttggctgttggcatgtacctagtagtagccacgcaacaaccataaaggcttaaaaaatggcagccttagctaaagtagttgtgatttgatgttatgtatatacaaggtgtatatattttcttgtgtgcaaatccccttttaagttttttcttaaaaaaaaataaggtataatctacatgtagaaaagtacgtaaatcttaagtgtccatttctgaattttttgcatgttgtacaagcccctttttcatatgatggggcataattcccttttctacatagttcttactgagccggaaattatttgagagtctctatataaggcacttcaattattactttatatttaatatacaaatgtgaacatgtaggatgtttctaactttacccatctgggcagggtcaaatacctgataaagaatgggataacggtgatttcattgtataaactgtcacaagtgtgaaagcattcttttaacaacatcttttctactcgtgttgttaattccagattattttgatctttgtttgctggaaattaaaagaaaagagatagtggtcactgctaatgagagtgaaatgggactggtattgaaattgctatcaggcctgcaaacaagtgtgaactttcaggaaagtagtttagcaatgttttatttgtttgttttttgagatggagtcttgctctgtcacccaggctagagtgcagtggcatggtcttggctcactgcgacctccacctcccaggttaaagcagttctcctgcctcagcctccccagtagctgagattacaggtgcgtgccaccacgcctggctaatttttgtacttttagtagagatggggtttcgccatgttggccaggctggtcttgaactcctgacctcatgtgatccacctgcctcagcctcccaaagtgctgggattacaggcgtgagccaccatgcccgtccagcaatgttttaagaaacgtacaatccttgatctacttataagaatctatagagggctgggtgcagtggctcatgcctgtaatcccagcacctggggaggcctaggcaggcggatcacttgaggtcgggagttcgagaccagcttggccaacatggtgaaaccctgtctctactaaaaacacaaaaaattagccaggcatggtggcgggtgcctgtaatcccagctactcgggaggctgaggcaggagaatcgcatgaacccagaagacagaggttgcagtgagcggagattatgccactgcactccagcatgggtgacagagtgagactctttgtctcacacacacaaaacaaagaatatatagggaccaagaaagagagatgtgaatcaagattgtatacaaaagagatgttaactatgttaactatatgaatgtttataaatttaaaaaaaaatctaaatgttttaaccttaggggaatggtttgctttgtggaaaggttatggagtcattaaaaaagtatgtttttgagaatacttgacgtgggaaagtgcacacaaaataaaattaaatgtgggaaaaaataggatatagaactataaacagcatgagtccagttattttaaaatatatatgtgaaaaagtggaagaaatatgctgaagtgttattagttaactctgtgttgtaggattatgggtgattaaaactttttttttaattttcccaagctttccacaatgattttactatttctgattcagggaaaaaaagattaaacaagttttttttttttttgtagtgtggttgtgttgtgtttggtttttcttataaacatatgaaagaaaaattgagctgaaaagcaagaaattcatggtaagatctgttggactctagtacctttgaaggtaaggcattcaccctttcttagagaataatcaaattaattactaataaggctgggtgaggtggctcaagcctgtaatcccagcactttgggaggccgaggcgggcggatcacaaggtcaggagatcgagaccgtcctggctaacacggtgaaactccgtctctactaaaaatacaaaaaaattagccgggcatggtggcaggcgcctgtagtcccagctactcaggaggctgaggcaggagaatggcgtgaacccgggagacggagcttgcagtgagccgagattgtgccactacactccggcctgggcgacagagcaagactccgtctcaaaaaaaaaaaaaaattaattactaataatattaccaaataataacaatgaactgtttattacataccagaagactaaaaaatgttatctcattttctcctcacaataaccctctggggtaggtggtattcttaccttctaggtgggaaaccgaggttgcagagaggggacttgcccaaggccacatggctagtaggtccccaaagcagtctggcccagagtctctgctctctgttgacttctctggccgactttacagtttccagagtgcttttttaacacactttccagaaagtctggaaaggactttacactttccagaatgctttcgcccagtgtgatctcagcccagagatgaagagaattcaagtctactccatggtggatagatagagctgaacccttagttctctttgaacaaggttcccttctaacccctaaagtgtgcttgttttaagagaaaggagccggctgggcatggtggctcacacttgtaatcctagcactttggtgggccgaggtgggcggataatttgaggtcaggagttcgaaactaccctagccaacattggtgaaaccccatctctactaaaaatacaaaaaaaaaattagcccaggcttggtggcgggcacctgtaatcctgctacttgggaggctgcggcaggagaattgctagaacccaggaggtggaggttgcagtgagctgagatcgcgccactgcaccccacctggctgacagagcgagactctttctcaaaaaaaaaaaaaagccgtcggtcaaagtcaggaatggctataaaattagtgatgtgttcccttttatgggccaaaaacatcattttaatgagatttaaatttatttaagctttttttttttcttttttgagacggagttttgcccttgttgcccaggctggcgtgcagtggcacgatctcggctcactgcaacttccgcctccggggtacacgccattctctggcctcagcctcccaagtagctgggattacaggcatgcgccaccaccctgggctaattttgtatttttagtagagacggggtttccccatgttagtgaggctggtctcaaactcctgacctcaggtgatctgcccgcttcagcctcccaaatgctgggattacaggcgtgagccacctcgcctggctaagctattaattaaattttttttcccaaagtcctgttttgaagtcctgtctataattaattttatttaaataatttagcaaaagtttgttaagcagaagagggaacaaactagttctttgtagttccagaggatagaggtagaggtctaggtatctacaaggtttagagtgcacaaaacatgcctcttcctctctgggagaatttttatgccgtttataaaacaaaagcaattcttcccttacaggtaacacaaggaacacactgtttctttaccagaatgtaaaaaatttagaaggccagtggcctgattgtttttacttgatcttatcttaaagaattatgtgtgactaagcatttcaatgcaagaatgcattgactaggaagacagatttcgtcttattatgagaaagaacttttaaagaaaacgatccaagctcatgttttatgttttgtcttttttttttttttttttttgagtcggagtcttgctctgttgcccaggctggagtacaatggcacaatcttcggctcacagcaacctccgcctcctgcgttcaagcgattctcctgcctcagcctcctgagtagctgggattacaggcgcctgctaccatgcctggctaatttttgtatttttgatagagacggagtttcaccttattggtcaggctggtctcgaactcctgacctcgtggtccagccgcgttggcctcccaaagcgctaggatacaggtgtgagccactgcgcccggcagttttgtcctttttttttttttttttttgagacggagtcttgctcttttgcccaggctggagtgcaatggctcagtctcagctcactgcaacctccgcttcccgggttcaagcggttctcctgcctcagcctcctgagtagctgggattacaggcgcccaccaccacacccggctaatgtttgtatttttagtagagacggggtttcaccatgttggtcaggctggtctcgaactcctgaccttgtgatctgcccgcctcggccttccaagaagtgcagggattacaggtgtgagccaccgcacctggccccattttgtgttggataagcaataattttaaagtttaccccatttggttttattgttgtttttatttaacaagacgtctacacatatatctattaaatatttatttactgatcattctttctgttgtcggggagagtaacagatcttcagttcaaggaggttggcgttcagacatcaggaagaaattgcaaaataaagtgttttggatcctctgtgagatttttgtcttttgttcctccatttgttctgtgacatcacctagaacatgacctgacaggtcagtaggagctcagtcttcattgaataaaagtatgagtttctgaatgagagaatcctggaatagatgaagtctgtcgcctttcagtcttcagattcttgggattcctcaagccatgtagaggaaagaaactttcctattgttagttttcatttgcatcttaccaactttgtgacttaggacaagtcatttattcttaatctgagttctcgtgtctataaaatgggcttaaatacctattttgcttgccacagtctttttatttttattttttgagaactaaataccataacgctaaagttggtaacctttgagtttgctggaagaatgaaagagaacaattaggtaattaaaatgttcaggtaagcgagcatgtgagggtgctgcaaaggcggcgtgatgaaattttggatcagtggagtggcacatgctattgatttgttatctcttggtctttgtacaacttgtaatttgcccccaggtagcagatagtttgaaggtcttatcagaaagtgtctcatacacctaaatgttaacaccaggtcataggccaaatagcagttgtccacatttgtggaggcctccgttactctttttctcatcatgacacatggcctaggtttgagtcccagtcccacctcttacctgctctgcaccctccgacaaggccctttaaactcttggtgccttaggcacgtcgtcttaaaaaggagaatatagtagtgtttactcatagggtaactgtgctagttaatatgcttactgtgtgtcattattagtgctgcactacctggacctggctttattttttttttttaatttaattttttttttgagacaggatctcacccacgttccatggagtacagtggcatgatcacaccttactgcagccttacctcacaggctcaatcatcttgcttcagcctctgagtagctgggaccacaggtgtatgcatgccaccaagcccagctaattttttttaaattttttttttcttttaagatggagtctcactctgttgcccaggctggagtatagtggtacaatctcggctcactgcagcctctgtctcccagttcaagcgattctcctgcctcagcctcccaagtagctgggactacaggcacccaccaccacgcccggctaatttttgtatttttagtagagacggggtttcaccatattggccaggctggtctcgaactcctgacctcatgattcacctgcctcggcctcccaaagtgctgggattacaggcgtgagccaccatgcccagcctaaatgtttttatttttcatagagacggggactcgctgtgttgcccaggctggtcttgaactctagactcaagcctcccttttcagcctcccaaagtgctgggattacaggtgtgagcacgtggctggacttggctttaagagaccagctaaagaatatagtggtaggaaaataaatacaggcataactcagagatagtgtgggattagttccagactactgcaataaagcatatatggcaataaagccagtcacacgaagtttttcgtttcccagtgcatataaaagttaagttttggccgggcgcagtggctcatgcctgtaatcccagcactttgggaggccgaggcgggtggatcacctcaggtcaggagttcgagaccagcctaaccaacatggagaaaccccatctctactaaaaatacaaaattagtcaggcgtggtggcgcatgcctgtaatcccagctactcaggaggctgaggcaggagaatcgcttgatgaaaccaagaggcggatgttgcagtgagctgagatcacgccattgcgctccagcctgggtagcgagtaaaactgtctcaaaaaaaaaaaaaaaaaaaaaagttatgttttggctgggcgcagtgggtcatgcctgtaatcccagcactttgggaggcggaggtgggtggatcacctaaggtcaggagttcgagaccagcctggccaaagtggtgaaaccctgtctctactaaaaatacaaaaactagccgggcgtggtggtgggcacctgtaatccccagctactcagaaggctgagtcaggagaatcacttgaacctgggaggtggaggttgcagtgagccatgatcacaccattgcactccagcctgagcaaaaagagcaagactcttgtctcaaaaaataacaataaataaaaattaaaaaataaaagttatctttatgccgtactgtagtctaagtgtgcagtatcattatgtctttaaaaaagtatataccttaatttaaaagtacctttttaaaaatttaaatattttattaattttttttttggaggggggacagtttcgctcttgttggccaggctggagttcagtagtgccatctcagctcactgcaacctctgcctcccgggtccaggcaatcctcctgcctcagcctcccaagtagctgggattacaggcgcctgccaccgcgcctggctaattttttgaatttttagtagagacggggtttcatcatgttggccaagctggtctcgaactcctgacctcaggtgatccacctgcctcggcctcccaaagtactggaattacaggcattagccaccgctcccggcctaaattttttcattttttaagtttatttttttgagacagagtcttcctttgttgcccaggctagagagtatagtggtgcaatcttggctcactgcaccttccacctcccagatttaagcgagtctctctcagcatcctgagcagctggaactacagatgcgcaccaccacacctggctaaatgttttgtatttttagtaaaaacgggatttctccacattgaccaggctggtctcaaactcctgacctcaagtgatccacccacctcggctttctaaagtgctgggattacaggtatgagccatcgcgcttggcctaatttttatttttttgagagagactctcactctgtcacccaggctggggtgcggtggtgcagtctcagctcactgcaacgtctctcgggttcaagcaattcttgtgcctcaacctctggagtagctgggtctagagatgcgcacactaccacgcttggctaatttttgtatttttcatagagatggggtttcgccatgttggccagggtggtctcaaactcttagcctcaagtgatttgcccacctcggcctccggaagtgctgggtttataggccggagccactgtgtccagctcccacaacttcctttgtttttgttgttgttgttgttgttttttgagatgtctcattctgttgaccagcctggagtgcagtggtgtggtcacagctcactgcaacctcaacctcctgggctcaagtgattctctggactcagcctcctgtaaaaatactttattacttaaaaaatgctggtgatcatctgagcctttggtgaatcataacctttttgctagtggagggtcctgccttgatgctgatggcttctgactcatggtggtggttactgaaggttgggctggctgcagcagtttgttaaaataaggcagcagtgaagtttgctacattcattgattcttcctttcgtgaaagatttctgtatagcatgcaatgctgtttgatagcattttatccaccgtagaacttctttcaaaattagagtcaatcctctgaaaccctgctgctactttatcagctaagctatgtaatactctgaatcctttgttgtcatttctgcagtgttcacagcatcctcaccaggagtagattccatcttaaaaaattgctgggcgggccaggcacggtggcttaacgccagtaatcccagctcttcggaaggccgaggtgacctcatctgaggtcaggagttggagaccagcctggccaacatggagaaaccgtgtctctactaaaaatacaaaaatggccaggtgcagtggctcacacctataatcccagcacttagggaggccaaggcaggcagatcacgagttcaggagatagagaccatcccggctaacatggtgaaaccccgtctctactaaaaatacaaaaattagctgagcgtggtgacacatgcctgtaatcccaggtactcaggaggctgaggtagaagaatcgattgaacccgggaggaagaggttgcagtgagccaagatcgcgccactgcactccagccaggacaacagagtgagactccatctcaaaataaataaataaataaataaataaataaaaataaaaatacaaaaattagccacgcatggtggtgagcaactgtagtcccagctactcaggagggtgaggcaggagaatcgcttgaacccgggaggctgaggttacagtgagctgagattgcagcattgcactccagcctgggtggcagaactagactcttgtctcaaaaaaaaaaaaaaaaaatcgctgggtgcagtggccaacccctgtgaccccagcactttgagaggccaaggtggacggatcacttgaggccagaagttagggaccagcctggccaacatggtaaaaccccatatctactaagaatacacaaattagccaggcatggtggtatatgcctgtaatcccagaaacttgggaggttgaggcatgagaattgcttgaaacctggaggcggaggttgcagtgagctgagactgtgccactgcactccagcctgggtgatgaggcaagacaatgtctcaaaaaataaataaataaataaataaataaataaatcactttctttgctcaccaataagcaattcctggctgggcgtgtggctcacgcctgtaatcccaacacttcgggaggctgaggcgggtgagtcacctgaggtcaggagttcgacaccagcctggccaacatggagaaaccccctctctactaaaaatacaaaatttgccgagcatggtggtgcatgcctgtaatcccagctactcgggaggctgaggcaggagaatcgcttgaacccaggaggcggaagttgcagtgagctgagatggaaccattgtactccagcctgggcaacgagtgaaactccgtctcaaaaaaaaagaagcaattcctcatctgttcaggttttattatgagattgcaacaattctgtcacatcttcaaactccatttctaattgtagttcactttccaccacatctgtggtgactttattcaatgaagtcttgaacttctcaaagcagtctgtgagggttagaatcaacttcttccaaattcctgttaatgttgatattgtgagctctctcatgaatcatgaatcttctttttattttattttatttttattttttttaagagatgaggtcttgctctgtcacccaggctggaatgcagtagtgtgatcatagctactgcaactttgaactcctgggctcaagggatcctcctgcctcagcctaccgagtacctgagactacaggcacatgctgccatgctggactaatttttgtttttttttaagagatggagtcttactacattgcctgggttggtgttgaactcctggcctgaagggatcctcctgcctcagcctctcaaatgaatgttctttttttttttttttttttgagatggagtctctgtcactcaggctggagtgcaatggcgcgatctcagctcaccacaatctccgcctcctgggttcaagcaattctccggcctcagcctcccgagtagctgggattacaggcgcatgccaccacacccagctaatttttgtttttcgagtagagatggggtttcaccatgttggccaggctggtcttgaactcctgatgtaatccacccacctcggcctcccaaagtgcagggattataggcgtgagccactgcgtccagctcaagtgaatgttcttaatgggatcatgggatctagaatggtgaatccttttcagaaggtggactttgcccagatccatcaaaggaatcactatttatggcagtgttgccttatgaaatgtgtttcttaggtaataacacttgaaagtctgaattactcctggatacatggactgcagaatggatgttgtgttagcaggcatgaaaacaacattaatcttgtacatctccatcagagcttttggatgactaggtgccttgtcaatgagcagtaatattttgagaagaatctttttttgcaagcagtaggtctcaatggtgggcttaaaaatattcagtaaactatgctgtaaacagatgtgctgtcatccaagctttgttccatttatagagcacaggtagaatacagttagcatgattcctaaggcctgtaggattttcagaatagtaaataagcattggcttcaatttaaaaagttactagctgcatttgtctctaacaagggtcagcctgtcctgtggagctttgaagccagccattgacttctctctagctatagaagtcctagatggcatctttttccaacataaggctgttttgtctatagtagccaccttcatcaaggtgggctaggtcttctagatgacttgctgcagcttctccgtcagcacttgctgcttgcttcatcttgcacatttatgttatggaggtggctactttccttaaaccttgttaaccagtctctgccagcttctaacttttctctgtagcttcctcgcctctctcagccctgttgaattgaagagagttagggtcttgctctggattaggttttggtttaagggaatattgtggctggtttgatcttctgtctagaccactcaaacttctttctttccctttttttttttttgagacaaggtttcgctctgtcacccagcatggaatgcagtggcatgattatggcttactgtagcctcagcctcccaacctcaagcagtccccccacctcaacccccccaggttgctgggattgcaggcatatgccaccatccctggctaatttttattttattttttgtagagacaggatcagcgtatgttgaccatgctggtctcgaattcctggcctcaagcagttgtcccgccttggcctcccaaagcactaggtttacaggcatgagccactacaccctgccaaaactttctctatatcagcaataggctgtttcactttattttatttatttatttttacattttactttaagttctgggatacatgtgcagaacgtgcagatttgttatataggtatacatgtgccattgatggtttgctgcacctatcgacctgtcatctaggttttaagccccacatgcattaggtatttgtcctaatgctctccctttccttgctccccacctcctgacaggcccctttgtgtgatgttcccctccctgtgtccatatgttctcattgttcaactcccacttttgagtgagaacatgcagtgtttggttttctgttcctgtgttagtttgctgagaatgatggcttccagcttcatccatgtccctgcaaaggacatgaactcactcttttttatggctgcaggctgtttcactttatcactcgtgttcactggagtagcacttttaatttctttcaagaacttttccttcgctttaacaatgtggctgtttggcacaagaggcccagctttcagcccctcttggcttttgacatgctttcttcactaggcttaatcatttttagcttttgattgaaagcgagggacatgtgactcctcctttcacttgagcacttagaggccattgtgggattattaattggcctaatttcttttttttttgaaacagagtctcgctctgttgcccaggttggagtgtagtggcacgatctcggctcactgcaacctccgcctccgaggttcaagcgatcctcctgccttagccccactagtagctgggattacaggcacgtgccaccatgcctggctaatttttttttttttttgttagtagagacagggtttcgccatgttggccaggctcgtctcgaactcttgacctcaggtgatccgcccgccttcagcctctcaaagtgctgggattacaggcgtgagccactgtgcccggccaattggcctaatttcaacatggttgtgtctcagagaacagggacagagatgaggagcagttagaacacatacaacattttttcaactcgccgtcttatattggtgcagtttatggtgccccaaatcaattgcaatattaacagcaaacatcactactcacagatgaccataatagaataataatggaaaagtttgaaatattgcaagaattaccaaaatgtgacatcaagacatgaagtgagcatatgctgttggaaaaatgatgctgatagacttgctcaagacagggttgccaatgaccttcagttaaaaaaacacatgcacacatagtatctgaagcgcagtaaaaggaatggcaataaaacgtatgctggtcaggtgcggtggctcactcctgtaatcctaacactttgagaggccagggtgggcagattgcctgagctcaggagtttgagaccagcctgggcaatgtggtgaaaccccatctctactaaaatacaaaaaattagccaggcatggtggcgcatacctgtaatcctacctactcgggaggctgaggcgggagaatctcttgaatctgggaggcgcaggttgcagtgagccgagattgcgccagtgcactccaacctgggtgacagagcaagactccatctcaaaaaaacatagtatgcctatacgagtttactagtttttagctttgtcaaggagagaatttaaaaaagaaaaattattcccaccattatttcataaaaagtaggatctaggctggccatggtggctcacatctgtaatcccaacacttttggaagcgaaggcaggaggattacttgagcccaggagttggaggctacagtaagcaatgattgtgccaactacactccagcctgggcaacaaaaacaacaacaacaaaaaggatctaacttcagaataaaggatatcccttcccaaggaaactagctgccttatagggacatatgtaggtatatacttataattctcattttaaacataaactgaggaaaactgccacaggccagctgtttaactttttggggccttagttttctcatctataaaataatgatgatatcctttttttttttttttttttttttccccttttgagatagggtctcttgtccagactggagcgcagtggcatgctcacagctcactgcagcctcgacttcctgggctcagatgatccatctcagtgtccctaatagctaggactacaggcatgtgccaccatgttgtattttttttgtagagatggagttttgccatgttgccccagctggtcttgaactcctgggctcaagcaattcccccgcgtaggcctcccaaagtactaagattacaggtttaagggctagagtgcagtggcatgatcatggcttgctacagcctcgactttctgggctcaaatgatcctcctgcctcagctgagactacaggtgcgcacccaccatgcctggctactttttaaaatttttagtagacatgagatcttgctatgttgcccaggctggtctcaaacccctggcctcaagtgatcttcctgccttgacctcccaacgtgttgggattataggcttgagccactgtgcctggcccaggggtctatatctaaatcctaaagcttgcggaagttctttcagctgtccccatggctttgggcattatgaataataatccataggacataattggaaggtgtttcagcttaggatggattggacttttgaaaagcgccccttcttatagtcaacacaacatctcattcccctgtgaactcacccttagggaaatcattttacttttggacaagtgagaccagatcctcagagatagtttgtgactcttgcaataataatagcaaatatttccttaatcttttctatatgccaggcactgtattatgtactttacatgtattaactcaaggaatccacataacaacccaatgaagtaggtactatccttgtacccattactcagaataggaaacaggccatgcatgctaggtgatgtaagctaaggattcagaggaaggagaataataaattacccccacttagaaagtactggtctgggtttgtgtgctctctcttctgcccacctccctcctctctctctggccctacttgtttttattaatgtggggttaatgccggtgatttcatatactaaccttgatcattgggaaatgtttctctcacgggaaggtatttggatgggcatagtacattctttggtttgtcttcttgatctctagtttagcttacttgttaaagatttccagaatgatctagcagttaattccagttccattttcccctccacctttttatttttagtgaggtcctaattggatttttttaatcttaatttttttaatttttacctttttagagatgagttctcactatgttgcccaggctggactcgaattcccaggctcaagcaatcctcccgcctcaggctcctgagtagctggggctacaagtgtgtgccactgcacccagctataaatagatttttataatgtgatttttaaattttagggtattaagcttatcttaaagtacaatcaaagcctgtcacccatttcatttctctaatgcctccttgaagtattttgcttttgacttcggggaagagccttggagattgggtactgcatgatgctgcagggaggccagtggtttatgttgtcgtcgtccgtcctggagtgcttgccttaatgctgctcatttcaaatgcctcctctctgtttccaaggttgaattagcatcaggtcttcttttacatcagccttgtctaatataactttctgtgttattcattatggtaaccaccagtcacgtgttgctacttgaaatgtagctagtggggctgagaaactaaatttaaaatttttattattattagtttaactttaaatggccaaagtagtgcagatctagactatgctccgtaagggaggttttttttttcttttctttttttcctacttctaattctgacatagggctgtgctctttatgtatttgttaaatgctttcactagctgaaatacaaggaaagttaaagtattccttaaagtcttcctcccagggaaaaccgttgttaatagttgtattttttaactgtaggataaattgccagtttttattatcattacagtgattcacccttgattctagggatcgggcgttactcaaggttgttgtagatttgggagttttaggagatggaggaggcttagaatgcaggttataaatgtaacagaaagaagtatgactaatactggtaaaagtgtctttataatgattgttgcgatatgattgaatttctatcctaatgcttaagaatccttagtgaaaatgtgggaaagaggatgaatcactgttttctcccttcccaaatcccagatgattttgctagaattttaaggatggattgagtgttcaggtgattttgtcttgacttcttgggttggttgggatctttaaagagagagagattaaaaaggatttactactagcaaaactgaaaaagcagaaacatgtctgcttgaattttgagtttcttttctctttgatagtggaagcagcatcttaggccaggttcattttgtaactggtgtgggtgtatgtatgcatgtgtacatccgtctcatgtttgttaaattttcttgactccctaacagttgtttgtactccacatcatcagttttggtaccttctactcgttactgaaaggatatatttaccttctcagtgggttggtgaagatggggggtgggggagcatatatggaaactgatgaaaatgataaaaccgtggtgctccaaagtaaagaaaggaatttttaaaagcctttgaattaactggaatgtgggatcttggattggatcctggtacagaaaaggcaataaatagaaaaactggtaaaatctgaaagtctgtagtttagttttttgtgctaatttcttagttttgacaaatacaccatggttatgtgaacattaggggaagctgggtgaagggtatgtgaggactctgtaacatctgcagcttttttgtatatctaaaattattccagagtaagaaattgaaatagaagctgtgactagcaagagcttccaagggctgtgacttcaccaagggagtgtgttcataagtagggcttctctctaagggcctctagaagttctgcttatctgcccacttccctccttcaactcagtgctctaaccatgtggaatgactaactctccccaaaatccatgcttctgggccgtttcatacacttctcatcggggtattctcctgctacaccctccccgaccgaaccaaaaacaaaatacataaagatcacctaaaaaacaaaaaatgcagcttgactaattccttttcattctttaggtctctggcttagattttatttttttcaggaagccttccctgacccacagaagtcagtgtcttgtctgagtttgcctgctgagtggaaccctcattgtgctggtacttagtactttgccttttttttttttttctgagacggagtcttgctctgttgcccaggctggagtgcagtggcacgatctcggcttactgcaagctccgcctcctgggttcatgccattctcctgcctcagcctcctgagtagctgggactacaggcgcccgccaccacgcctggctaatttttttgtatttttagtagagacggggtttcaccatgttagccaggatggtctcgatctcctgaccttgtgatccgcccacctcggcctcccaaagtgctggggttacaggcgtaagccaccgcacccggcctcaatcaataatatatatatatatatatatatatatatatatatatatatatatatatatatatataaaatattgattttatacacacacacacacacacacacacacacacaccccacaacaagaagtaaggctcctgctcacaccttcttaggctccactggcagcagcttccctcatgcccttgggtaacggtggctgtggtttgctctgtaccagcatatatgctgtagatggccaaatccctgccagggagacaaactcagcaccataaaggtgagaaagcacattttgtaaggcttattcttatatttcaaggtcccaggggtccaatttaggaaaatgttttgttttttaaaatctgcttagttatgtagcattatcttttcctgtactatgtgaatttacagctcattttaccataaaagataatgtgtaggttgtttaaaacctgttctttggccgggtgtggtggcttatgcctgtaatcccagcactttgggaggctgaggcgggcagatcactaggccaggagatcgagaccatcctggctaacacggtgaaactctgtctctactaaaaatacaaaaaaaaaaaaaaaaaaaaaattaggcaggggtggtggcacgtgcctgtagtaccagctactcaggaggctgaggcaggagaatcactggggtggaggttgcagtgagccaagatcacgccactgcactccagcctgggtggcagagcgagactccgtctcaaaacaaaacaaagcaaaacaaaaaaccctgttcttggactgggcatggtggctcacacctgtaacccctgcactttgggaggccgaggcaggtggatcacccaaggtcaggagttcgagaccagcctggccaacatgatgaaacccctgtctctactaaaaatacaaaaaattagccaggcatggccaggcgctgtggctcacacctgtaatcccagcactttgggaggctgaggtgggcagttcacgaggtcagtagatcaagaccatcctggccgacatggtgaaaccctgtctctactaaaaatacaaaagttggtgtggtggcgtgtgcctgtagtcccagctactcaggaggctgaggcaggagaatcccttgaacctgggaggtggaggttgcagtgagctaagatcgcaccactgcactccagcctgggtgacgagtgaaactccatctcaaaaaaacaaaaacaaagacaaagaaccgttctttagtaaaccaatcaacagcgattaattatataaaatgtgcaccgccttaggtggtatacatagcactatcagacatggctcctgcttttgaatttcttactttctagtaggggaaaatagaatatcctcaccccacagtgtgttactgtggctcaaccacatgaatcaggaaacaagagtagaggccattcggagcttgcagtgagccgagatcccgccactgcactccagcctgggcgacagagcgagactccgtctcaaaaaaaaaaaaaaaaaaaaagagtagaggccattgtggtgggtggtgaaacattacaagtactaaagccattgcttcagctttctttaacagtgtgaccgctgaaaaactaaatggttagtgttttgggttgcctctagtgagacatggctagacgtgcagattctaagcaaaggttataggaacttgaggttctgtagacccttaaggggttgggtcaggggtgtctatgatgctttcagaatgagtatatgctgaattttggggtctgtatattttctgcagagagagaatttgtagatttcatcaaattctcaaaggaatccatgacccaaaaaagactacaaccactggcttagagtaacactgagccccatggcctcattttgtctccgttttactttactgttctagattgagacctgccttttatttttccctgatacttatttggaggggtccttgatgcaaagaactctattgttgaacatctaaggaggagtatgtaagctttcttttttggaagcttgggtattatggctcttaaatcttcatcttttctgtcattgtttagtaaaaatgtctttctatttgaaataatgattactgtatttctaggtgcaagtattcattcatttgtcatgtatttatatgctgaggcccatgctgggcagtggtcatagagagatgaaatgaccagatcctggcccttagaggcttttagtgatacacatgtaagtgctcagaaatggtagctgttagtctcctgggaacagctattatatagtgtcatggccaaagtcatagaggatatacagggtagaacaggaacacaggagaggttatctagactatgtttcattgaaatttcactgttgattcatctcattagctcattgatgggttgcaaacctttgcatgagagggtgtaacagattaggtgtttggggcctttgccaaactggagaggtacagttggaaacacgacagtgactgaggctgtagctgtgacacatgtattcaaatggaactcacttaaaaactattgactctatttctctacttttctgtcgacaacagtatacggttctgtttgcccttagtcactcaggaggtatttattggatgcccagagggtgtgtaatactggactggacccttggactggactgtttacttactagaagagcagatggaaatgattgggttgtggctctttggcaatattctttgctgtctcccagtagtcagtatggtaataagcttccctctggtgggaggtaggatagttgggctttggaaatcaaaataccagagttccaaacccagctctgccactttccatctgggtagccttggccaggtcagttgatacctctgagccttggttttctgatgtacaaaatggggatataactatcacccgccctccaggacttctgccacatagtagagcccaataaatggaagttgtattgttactagcaggtgaggattataaaccatggaggaattccctcactttattgattcattaaggataattattatgttgtgcagaagaaggagtattctacttatgtgaatgggggagtttggaattcctagttagaaacagtggctcaatctctcatttttggccacttttcttaggctttttgctagggcaagttttttttttttgttttttttttttagatggagtctcgctctgtaaccaggctggagtgcagtggtgcaatctcggctcactgcaacctccgcctcccgggttcaagcgattctccttcctcagcctcccaagtagctgggactacaggctagcaccaccatgcccagctaatttttgtattttcagtagagacggagtttcaccatgttggccaggatggtctcaatctcttgacatcgtgatctgcccgcctgagcctcccaaagtgctgggattacaggcatgagccactgtgcccggccagggcaaaggttcttaatccagggttcctgaattttttgtgtaagtccattctattttctgggagaaagtgttcaagtttttatcagattgtcaaagggattcttaactgccaaaagattaagaattggttaactggccaggcgcgatggctcacgccttaatcccaccactttgggaagccgaggcaggcagattgcttgagttcaggagttcgagaccagcctgggcaacgtgatgaaatcctgtctttaccgaaaatacaaaaattagccaggtgttggccgggcacagtgactcacaaccgtaatcccagcactttggaaggccgaggcaggcagatcactgaggtcaggagttcgagaccagcctggccaacgtagtgaaaccctgtctctactaaaaaaaaaaaaaaaaaaaaaaaagaaaaattagccaggcctggtggcatgcctgttgtaatccaagctacttgggagactgaggtaggagaatcacttgaacccgggaggcaaaggttgcagtgagccgagatcgcaccactgcacctagcctgggcgacagagcgagactttgtctcaaaaaaaaaaaaaagaaaaaaaaaaagccaggtgtgctggcacacacctgtagtcctagctacttgggaggttgaggtgggaggatcactggagggaagtctaggctgtagtgagccatgatcacgccactgtactccagcctgggtaacagtgaaaccctgtctcaaaaaaaaaaaaaaaaaaaaattggttaatggacctgttgggtgggtatggagccacagttggtacctttgatcctgaaattgtccattataataagatattactgagagcaattttctaaagtacgaagtatgtaatgaagatacagggagaatattcagaagtttttgttggctgctttttttttttttttttctgccaggagtaggtgggacaagtataaaggaaagtggtatcaggaggaagtaagaagtaagaaaccacctaaataattgttagctgcttgtcctcatagttctttccataggttgattctgagttggggcgtctctgcactgtaccttgcaatcaggccggaccacttgctttttcctgaacactgtgttcaggctttgtatgttcatgaggtccctctgcctagagtatctcttctcccaacatttgtaagtccagttctccatgcatcagagcttcctggtgttgccttttagagttctcatcagcttataactccctggagagcactgactctcatcttcggatccttcaccgtcatggtcctttgcacatggtaggtgctaaataaagggttgtggaactaagtgaagagtgatacatatgaaggaaacaaacacctgtgtaagggagaaggctataaattaaaattttcagataccagtgaattctgcgggggagcttgggaaacccttagagtttcactgacaacctgaatagggggaggagcctgccctgagttaggaagcaggagtgtggggaacaggtagccagccataaggtcttggccaggtcatatcacttctggactggagttaacaccttcaaaaactgttcgggttggactttttgaacatataatagaggtgatgttgatgagcatctaccgtataccaggtactactctaggtcctgggaatatagtaggttgccaccagacaagaccccttcttttctagtgggaagcattgggtgggaagttagtcctttctagccttaaaatgctgtgattctgtcatctgaagaatgggcaccaacttctgcttgggattgttttgaggatcaaatgagaaagcactttaaagattataaaacacacttaccttgtttattatgaatacttctctccccccttggttttgccccccttggttttgacttaggttttttaaaagtttaaaattgaattgtaccaataggagtatgaactaatgatcccagggtttaggtagatttggggacttaaatctttcaataagtgatcctttagctagattgggatgtaggtttgtaatatcatcttcaccagtgaaaaatgtattgggggggaagtccatttatttatggatattttggatattttgtttctgccttaacataagttcgttcgttcgttctttctctttttttttttttttttttaagatttcaaactgtctctgccattattcttaaatacaactttatattggtgaaggctgcttgtcagggaaaaaccaaacttctctactgatttgggatttttttttaccataaattcagggtgcagttgttcttgaagtggttccattttgtgattaggctgagtatttttaagcacaactctctcccttgtccttagaattatctccagtatcctcaaaacaaagagcaaatgatgcaattaggatgcaatcccttgcctgtggatttcaaggaaaattattttccacactacttggaagctcatggacaaagtcaagctttctttagatctggtgaacttagaaaaaataacttgatgaagtgagattcttaccttgaggttagtttttgagagtggatcaatgatgtgaaatttctaagatattcttgatttataaatatcactttatgactcattccttggagcagtttttattttttcctttgaaaaactttagatgtaattgactttggtttacactctatcctgttttttggtttttttttttttttttttggagacggagtcgctctgttgcccaggctggagtgcagtggcacgatctctgctcactgtaacctctgcctcctgggttcaagcgattctcctgcctcagcctctcgagtagctgggactacaggtatgtgccaccacacccagctaatttttgtatttttattggagatgggatttcaccatgttgaccaggctggtctagaactcctgacctcaggtgatctgcccgcctcagcctcccaaaatgctgggattacaggtgcaagccaccacgcccggccatacttttagtgaaaggaaagccatgtatctttttctgctgtctcctatgtcatgtcttactctgccgttttgtaatggtccttgagattgagataatagagagagattttctagattttcacctactcactgatttttactacaggcattttaattcctttaaatttgagactgattttcttcccatagtatttaacttatcatcatccttataggagggccagacccttaggatttatgtgaatactgctagttggtaggaaaggtacttttcctgaagccttgaaagagtatttccagaatagtgagcttcatatttttttggtaacttttttttaaaggtatactttctgtgtaaatagaaatgaatttttgcaattggatgagggggaaaaaagctgaaatttaagggcaaaatcttttttttttttttttgagacggagtctcgctctgtcacccaggctggagtccagtggcgcgatctcggctcactgcaagctccacctcccgggttcacgccattctcctgcttcagcctcccgagtagctgggactacaggcgctcaccaccacgcccggctaatttttttgtattgttagtagaggcggggtttcaccgtgttagccaggatagtcttcgatctcctgacctcgtgatccacccgcctcggcctcccaaagtgctgggattacaggcgtgagccaccgcgcccagccgggcaaaatcttatagcatcttatcccttctatggtttgggaaattaagaaaagtgcacgttggtgttttctcacaatttaatgctcaggcaagtaaaatgatatccttaattgcaagttactgaagttgaaaggcgaccatttcccatcaattagaaatggtctttatggttaactctggcagaaattctgttcttctgtgaggcttgggtgatatcagtaatcctattgaggagagagcatattgaatcctctgactttgggcaaataatttagtctccaggtcccaatgcccttgtctgtgaaatgaagagaatacttacccttcccgggtggatttaaaaatctgtgaggaaggccaggtgcggtggctcatgcctgtaatcccagcactttgggaggctgaggcaggcggatctcctgaggtcaagagtttgagaccagcctggccaacatggtgaaaccccatctctactaaaaatacgtaattggctgggcttagtggcacatgcctgtagtcccagctactcgggaggctgaggcaggagaatcgcttaaacccaggaagcagaggtttcagtgagccaagatcgcgccactgcactccatcctcggtgacaagaatgaaaccccgtctcaaaaaaaaagctataaggaagcccagcacagtggctcacacctgtaatcccaagcactttgggaggcctaggtgggaggatcacttgaactcaggagttcagaccagcctaggcaacatggtgaaaccctgtttctacaaaaaattagccaggcgtgatggtgtgcacctgtagtcccagctgaggtgtatcaccggagcccgggaggtcaaggctgcagtgagtggttattgcgccactgcacctgcactccaacctgggcaacagcaagtccctgtctcaaataaaagctaagaaggcaagttttgtaatagtactttgagcagcataaggtacatatacaaaatattgtgggaaatatattatgaagttttgcatctaggtacataagagactgtttccctcacagtggagagctttggtaaaagagcaagtggattagagcagttgtagcttctgttttctccagaaagctcacgctgtgcagcagctgtttttgtccattctggctttgcagcagtgcagtattggggttaagccacgtgtgtgggcctcagaggcaggcagctggggccatactaagccgggtgatcttgaacgagtctcttgacctctgcaagcctgttttctcatctgtaaaatggggattataatagtagctgctctgttgggttactgtgagaaatgcttaatatggattgtagggcatgatttcctatggtaaggtttttagaagtaataatggaccagctaaaaatgttcaagcatttatctactgggcatgttgtctttttttctttctttcttttgagacagcttcttgttctgtcactcagtctggagtgcattggcgcgatcttagctcactgcaacctccgcctcccaggctcaagggatcctcccacctcagcctcccaagtagctgggactacaagcgcatgccaccacacctggctaatttttttttttttttttttggtagagatagggttttgccatgttgccagactggtcttgaactcctaaactcaaacaatccacccgcctcagcctcccaaagtgctggggttacaggcgtgagccatcgcgcccagccttcagcatgttgtcaaaggaagtatgaaaatgacaacaactgatggcccattttcatcagtcatcctggaaatcagcaagagtcaagctgctttgtgcacttattggggtgcacttattttctccaaggtgtccatttcatgaggcattttttgttaatggaaagctgggttagcaaatgcagtgatgaagggccataagtatagttttagtagttgttaacccttgaaggtagtgggtttattttgtctttttttttttttttacgacctccaacactttctatttatcttggcttaatataatacctgaaaatgaattttagttaagacttagagatttgtctaaacaatctccaagcaggttgaaaactgagactttcaagagccaggggatttgagtgtattctggattaacttggttcttcatctttccaagaaaggtaaactgtgttctaggcagtttttgtaatgggattttcaggctagatctttaaccaaaaaaaaaaaaaaagaggccctacagaaacttagaaacagcctttacagggtcaaggggagctttgacaaggaagaggcaaaaatctctgccccatgtgtcagttgaacttcttccaccttccctcaccagtggctacatttcagggctgaaagggctttggaatcctttgctgagtgctttggatgagatttgttttcaagttgctttttagaattagagtgaccatttacatggttttcattcccaatctgtgaattccaaagccttataccagtcaccaggcagatacgttacctaagaagtgcctacttttggaggccgaggtaggtggatcacctgaggtcaggagttcggctaacatggtgaaaccctgtctctactaaaaatacaaaaattagccgggcatggtggcgcatgcctgtaatcccagctacttgggaggctgagccaggagaatcacttgaacctgggaggcagaggttgaagtgagccgagatcgcgccactgcactccagcctggctacaatgcgagactccgtctcaaaaaaaaaaaaaaacaaaaagaagtgccctctgtgtgtaaggttctgaggaaacataaaggaaggattctcccaattccacaaaaactcgatttagtcaaaaaaatatacttattgactttcctaaaaaattaaaaagaaaaacaactaaatacacagccaactagcatcttcatttttagaactcaaaaattaattggaatatacctagggagaaattttctggaatttcattttctgggatattttttaaaattgctagtcctcattcctttgtcattttatatttcattttccatcttagttaatattgctgtttttatttcctcattctctgttattgtatcagttattgtccaatcaggaaagtagaaaccactctagatagttccagcaggaagggacttaaatgcaagggatttattacaaaggtgctggaaaggcttgggaggagcaaaatgcagaagagggttgttatccagagatgagaaagctgcctgtgggctagaacccaggagcctccatgcacagatgagctgctgctgctgctgctgctgctgctgctgctgctgttggagctgtattgctgcagttcaccaggaacccagaagccaaaactgcgctgatgtgctggaacctgcggtgtgtgtagttgcctgcattcttccatagttgttcactgctcctgctgctgctgctccccaagacagagcagtaacaggaaaaaagtggtgttatccttccacttgccaaccaatctccagcctttgaaaacctaactgtggaagccagctggcaaaggagtctgggaaatgtagtgtgcaggctttcagttctgctgatacggaggagaatgtagaagggcgcgtttgaccaaatgaatgctgtaattgcttgggtgatgcatttctcataacggagatgggcagagaaggcattattttacactgataacattcagagaggtggagaagaggcacagtggcattccagataaggggatagccagagtggtggtgtggaggcaggaatgctcatggcatgttcagagaatagcttagctggaccatagagttctttttgaaggatagctagaaatgaaggtagaaaataaggttgggttcaaattggattgagattgtggtagtaaaagctgtcttacaattaacccatgttgggtgtggtagctcacgcctgtaatcccaacattttgggaggctgaggctggcaatcatttgagcccaggagttccagaccagcctggccaacatggtgaaaccttgtctctacaaaaaaaatacaaaaattagccgggcatggtagcacacccacacatctagtcccagctactcaggtaactgcagcgggaggatcgcttgagcctgggaggttgaggctgtggtgagccataatcgcgccactacactccagcctgggtgacagagtgagaccctgtacaaaaaaaaacaaaaacaaaaacaaaaacaaaaaaaaaaagaagaagattaacccatagcactttacacagtgatttgagctgggatagaccaatgaggaaactcttatgatagctcaagctttaagggcttgaggactgtggtaaaaacctgtacattcaagacaaagttgtcttgaatgaattgtttctgtcttaagaactgaggctatggtagtggagttggagataaacagttcattcaaaacaagcttttaactgatgtacctgtcaatggcttggggcaagtaattggaataaataatgaattctgattttctgttgatttttctatataaattgaatttgttgattaccttatgctcttgaaaaggtcttagttctctcttttttatgcttttacttctctgggataatgccttgataagttagactcatcatggtattgttaggatcttccttgaagtggcattaaattcactttgatcataaactttattcataaatttgttttttgttttttgggtttttttttttttttttgagatggagtctcactctgtcacccaagttggagtgcagtggtgcaatctcggctcactgcagcctcctcctcccaggtttaagtgattctctgcctcagcctcccaagtagctggaattacaggcatgtgccaccacacctgggtaatttttgtatttgtagtagagacggagttttgccctgttggccaggctggtctcgaactcgtggcctcaagtgatccgcccaccttggcctcccaaactgttgggattacaggcgtgagccaccatgcccagcctttattagccaatttgaaacctgtgcaacaagttctgcagggccttgataacttgaggtaatacttaaattacttgtggacaggtttttggttttttctttggacactaattcattaattccatttaggaggtatttattgagccagcagtgtgtgtggtgctgaggtcacatgaggagcagaatagataagacattaaatccccatctttttggagttaacaatttaatgagaaatagaaattaaagaaaaaaaaaacattcctcggccttagggcccttgcagttgctgttcagctgcctggaatgctgtcccccagatgcccagattcttaactcccttgcctccctcatggctgctcccacgcctcctgctcagtgggacctgctctggccatccctttcagctctgtgcatactcctctaccacgtgccggggctttctccccattctatttccctcctaagtttgctttgtaattgtctgtttccctctgctagaatttaagttccatgaggcaggcatctttgtctcttttgttcattgctgtatccacatgcctagtacagtgcctggcacagtagtaggtgcttgctcagtaattttcattgaatgattgaatgggcgaatgagaataaataaatgagggcatccagggaacccaaggaaggctacagtggctagtgagaaaaaggcagaatggtggagatgagatcacatagggaataagaatttgagggtttaatataagagcaggccaggcatagtggctcacccctgtaatcccagcacttcgggaggccgaggcaggtggatcacttgaggtcaggagttcgagaccagcctggccaacatggtgacaccccatctccactaaaaatacaaaaattagctaggcatggtgacgcgtgcctgtagttccagctacttggaaggctggagcaggagaatcacttgaacccgggaggcagaggttgcagtgagccgagatcgcgccactgcactccagcctgggtgacagagcttagactctgtctcacacaaaaaaaatgatcaaatctgttctttaaaagataacttgctgctctaggagagcaagagtatacatgtgaagaacgcgtaaggctgtggggatccaggcgatctagattccctggcagcagatacgttggctttctcagctgttgaatttgagtgcccattccaagggtaggcattgattgttatcattctgattatacttgcatgcacttaggttatcattagcccctagagacttacctgtctccttgaagaacatcattgtccagtgatcctgctgacagatgagagctgtcaagatagcttggctgtgagatgccatttaactagtttttatctgtgtatgctttccctccccctgcaagatttaatgacctagccaggagagagtctaggcttcctggctcctctccaagtgttctaccactaaaatgttaatattacctttctcagaattcttctgaatcacttgttggcactgtaagtggctttttaaactttgattttgccatttttgagtctgtttgtactaggattttttgctggaggaatttgagctgatttgattacttaaagaaggccttttcacttacctttgctttttaaagttgagtagcctgtgataggtgggaatgtttctgccacctgacatgttagttggcaaagtagtagaggcagcctttaataaaagtcactctggaagaatattagttgggtacttagcattcttggcattcttatggaatgatacaggtttatggcctttttattaagttcttaaaatcaaatgatctttaattagaagcaatcatatataaaactttgtgactccagacaacactggccttactgtattctactatggagtggggtttgtgcctgtaggaatgcaggtttgggttaggggagcggagaaaggggtgtgagaaggccatattgaacacattgtagcctggtctgtgccatctgctcccggctgccttactggtatggaatgtggacatacagcttttgagcctagctgtaccttgcttggcttttagctctcatgattcaactggctgagcttagctttctgttacagtcagtaaggaaaatggagttgagcagcctgttttttgaactcaggtagtcatgaggcttgacaagccatgacacatatattttaatcgccacggccccctctaatgttttaaataagacagtagaggaatatttacattcaaggaacaacaagttatcacaaaactccccccaacatacacagcaagaaaaatgccaccttattctattgtatatgattcttcactgggcaaaaagggctctttatctgaatgcaatctatgatgtcctcagtgaagaaaactaaagggttggtgtgtatgatatcgcattttggtatgaacagattatatatgtttctgtgcccacacctgtacccttgaggagcggtaatagccagaagggatcgtggtgttagagatggcaaagctaaggctctgacaggctctcttaagttaaggccttgacagtgggttttctgagcagaaagcagaaatcacagatggattcaggggccggggagtggtctgcggcattggggagacacatgcaatagtgaaggaactgggttgagacacctactcatccccaaaccctctcttcattctgcacacagtaatcatattagctatggtacaagtttcccataagattttaacatagtaaatgccgtgggagtcagagtcggtctgctgacagggtttttataatggtgatgtacgttgttgtgcattgattttaagacgattcaaaagaaagtagctgctctgtgctcttcccagggccattcagagccagggagtgggaggtgaggccacggagggaaccactcagtgggtttatcttgggcattctgtgcatatgtaactgagaaaggtatgttgttacctaatgtatgcttttgataatttggaccaagagacatggtattctgaatagcagccaaatatatgaggtcaaggtgacttcctctagcaattaggacagctgtcatggaagagtaggccagacctgatttccttcttaagtccgagggctaaaccagtgataagagatgactcgttgatcttcctgatattactggccaagcactttctaaggaatgacgattgataaggaagaacaaactactattttggtctcttatctaaaggaaaatcatgaagctagcactttatagaaaatgcacttattcagttccttgtatgatcacaaatgttttcttagttatttttgggctccccaacaggatatgttacttatagtttgaaattcgcctttttttttttctctgaaatatatcttgaagtgttgagtggtggctaggtgccatatagaacatacaagcagaattttatagaagtatacatttagtgaggggtggagattattgctttaataaatgggactggctggatgtcattcttttttgtccccttcccagtcactttgactctagggtcttgattaatgtgatcatctctgcagagtgtggagagacagcactgggatgggggtgggaagtgggcgcaaagcctttcttagggcacagacagctctgacagcagtttctgggactgccttcccctctccccttcagcttccgcatctgtgacgtgagggagctggctgccagcattcccagcttggcctgccttccagtggctttcattcagagacagcagatcatgttcatctggaagttttcttagttgttcatctcaagaagaatcttaggaattttttttcaaatcagccagttttcctcagattttgcttcttctttatctgccctgttcctttggctaatcttctgtcagcgagacacagggtcatcagtttaagtatgggaaggaaattatggccttgagcacaggcagaaagcatctggctcccaggcgcttcctgtgagccaccatgaaattacaaagactgggcctgacaaggcctttcaaaggagcatctcacaccaccactgtgtcagcatttccatgattccatcgtaaagcagttgtttttcctgatgcttattatgaccaggttggagttggcctttacatgggaagcgtttatccagtggatgagagtgaaacagcaggacagaggtggcgggggagagggctcagattgctctcggaattcccttctccagcccggtcctgaccaagccattcttgctcagaagcctgtggttcctcagaggatgaagtccagactgtctttagcgtgtcaggaccctccacagacttgcccccagcgtctcccaccatatgtgcctatgctccgcgttcctgttctccagccagggcagtgcgggggagtggagggacgagagctgggggtggtgtcaggagacctgggttctggactggggttcctgtctatctagctgagttatttcatttctctctgtctcagtagttactaatctggataggcttaccaaatgagaggaggagaagaaaaggtttaggagacagattacaaggctctttctgattcttgtctcctggcctagcttggaaattagaacaccaaatgtctgagcattaaatgggtttttgaaccatgaagttttttgaacttcttaaaaacaaaaacaaacaaaaagaaaacactgtaggttgggcgtggtggctcacgcctataatctcagcactttgggaggctgaggcgggtggatcaggagatcgaggccagcctggccaagactgtgaaacctcatctccactaaaagtagaacttaaactttttttttttttttttttaatagatggagtctcattctgtcacctaggctggagtgcagtggcgcgatcttggctcactgccacctctgccgccggggttcaagagactctcctgcctcagcctcccgagtagttgggactacaggcgcctgccaccgcgcccagctaatttttgtattccaccccccccccccaagacagagtcttactctgtcacccaggctggagtgcaatggcgcgatctcagctcactgcaacctccacctcccaggttcaaacgattctggtgcctcagcttcctaagtagctgggactacaggcacatgccaccatgcctggctaatttttttgtatttttagtagagacgaggtttcaccatgttggccaggctgttcttgaacccctaacctcacatgatccgcccacctcagcctcccaaagtgctgggattacaggcgtgagccactgtgcccagctaattttgtgtttttagtagagatggggtttcaccatcttggccaggctggtcttgaactcctgaccttgtgatccacctgtctcagcctcccaaagtgctgggattacaggcgtgagccaccgtgcctggccacatttttttttttttttaacgtgggacaccaacatacaaaacagatcaaaagctaggtaaggtggctcacacctgtgactccagcactttgggaggccaaggcaagaggattgcttgagcccaggagttctacaccagcctaggctacatagtgagatcctgtctttacaaaaaataaaaattaaaaaaattaggcgggcatggtggcccagctacttgggaggcttggtgggaggattgcttgagcccaggagatcaaggctacagtgagccatgattgtgccactgtactccagcgtgggtgacagagtgagaccctgtctcataaaaataaacagaaacagatcaaattggacttgctctcttgaggctgaaaggtctgacatgccacctgttgagtcttaaaacctgccagttccatccagggctccccagggcactgcttctctgcatttcttctctcttgctatgcagccaggattagagtcacctgtttgacatgaccccaggcaggggcctagtgtagaagggggagattgtatagaaaagtgtataaagtatgtacgatttgaacaactataaagtgaataccaatataaccactacccaagtccagaaatagaacagaagctccactttgtatttagtattttccttggttccattcgttctgtttcttagcttcttagccttagcttcagtacagatgcagtagataaaataaaagccaatggcttttatatctccttagtctcaaagcaggaatccaaaacactgctttcaaatacagatgataaatatttgaataagaaataatattttggctgggtgcagtaggtgacacctgcaatcccagcactttgggaggctgaggtaggcggatcacatgagcccaggagttcgagactagcctgggcaccatggtaaaaccccatctctacaaaaaatacagaagttagccaggcgcgatggcacatgcctgtagtcccagctactctggcggctgaggtgagaggatcacttgatcctggggaggttgaggctgcagtgagttgtgattatatcatactgggctccaacctgggtgatagagtgagaccctgtctaaaaaaaagaatcttttttcttaataaaaaatattaataataagaaatatgttataataaattttgtttgtttttgagacggagtctcgttctgtcgccaggctggagtgcagtggcacgatctcggctcactgcaagctctgcctcccaggttcacgccattctcctgcctcagcctcccgagtggctgggactacaggcgcccgccaccacgctcggctgattttatttttgtatttttggtagagacgggatttcaccgtgttagccaggatggtctcgatctcctgacctcgtgatccgcccgcctcggcctcccagagtgctgggattacaggcgtgagccaccgcacccggcccccattcattctgtttcttagcttctttttttgtttgtttgtttgtttgtttgttttttgagacggagtctcgctctgtccagcagtggcgcgaactcggctcactgcaagctccgcctcccgggttcacgccattctcctgtctcagcctcccgagtagctgggactacaggcgcccaccactatgaccggctaatttttttatttttagtagagacggggtttcaccatgttagccaggatggtctccatctcctgacctcgtgatccgcccgcctctgcctcccaaagtgctgggattacaggtgtgagccaccggccctttttcttagcttcttaggttggccttagcttcagtacaggtgcattagataaaataaaagccaaccatcctttttaaaaggatatacatgtggtataacttttattacttgcgatagcctgttttgggactggcagtttacagaataatgcaagtgagtagtgaagaataattagaaataatgagctgaaatcctcatgtcatcctaacatgccatcaggaaatagtaagccttactgttggactcgaaaataagctgacccatttttccccattgacagaaatgcctgtttcttcagcactgtcctttgttggcaaggcacatttggctggacgcagcctccactcttcttgcgtcagggacatttatatagagaatgttctttcaaaaagaacttttttcctagtgagaagttttaaaaaaaaattagtagagtataactgcttagaagcaactgctggaataattttataggttttacttacccttttgaaaatcaatgtaaaattggtcttaatgccaggaaatttcaaaggtaagactcggctgtttttttgtatcttgacttggtaagaatctcagctcactgtggtaatggtaattatgctgtgatacctaggcttattggagtgcctccaatttcgaatttgccttggttttgtattccctttgacgtagaatatttttacagcttatcagaatcttggtttttgttgttgtttttcttaatataggtaatccagaaattatgctaaatcagtgagaaagacttcttagcttttgattttgtctttgtttatatttgccttatactttgatcagatagcttaattagaattccatagttacctggtagaaagctgctaaggataaagcttaaggaagtactttggctaaaagcggctccctttattcatcaggggaatttgatttcatcctgtggataacatagcttagaaattctgtttctttgggaccagcctgtagagttctgcaagcctggaagcatgagaactgtggcgggggaaaaatgggctacttgctgtatttagtgtgggctgctaggatggtaaggtagcaacatagttctgtattcccaccctggaattcagaagaacctttaagcagggattgcatggaggtggggaggacaaatcaagaggggcaggaggggacatttgcaaaaattataaatggaatgtcagagaatctttcatagctactctttaaaaattaactttagagccaagagtggtgtggctcacgcctgtaatcccaacactttgggagggtgaggtggtaggatcgcttgagcacagaagttcaagaccaccctgggtaacatagtgagacctcatctctacaaaaaaaattttaaaaattagccggccgtggtggcatgcgcttgtagtcccagctactcaggaggttgaggtggcagaattgcctgagccttgaagattgaggctgcagtgagctgtgattgcaccaccgcactccagcctggggaacagactaagaccatatttaaaaaacaaaaacaaaaaaactttaggccagattattttcaaaacaggcatgcgagttactagcccttgaaagtctactgatccctttgtggtttcctttggtcttctggagtgtgctgcacattgaatttatagagagtatagtgagagctgaatgcgcgtaatcaatatccaagaatctgttgcatgagacgacgtgtttcaagaccagataggcaaacactgaaatcagtctttctaaagatccagatgacccatttcagagactgcctgtacccagagccctagggacatagtgagattccatggctatgaggaaatcttcctctcacattgggtaggagtaagtgtatgtagcctatactagtgggaacaactaccccaccaacactgttctgggcaaatgtcactttcttttttccccttggcaaatcctggttttgcataccatccccacaatgttattattttatttttatgttttttagaggtggagtcttcctgtgttgcccaggctagagtgaagtggcttttcatagatgtgataatggtgcactgcagccttgaactcctgggctcaggtgatcttcccacctgagccccctgagtagctgggactacaggtgtgagccaccacacccagctcaatgttgttattttaatttgcattggactgaaaggtagaaatataattgctatattcaaatggagttttcgtttatgtaagatgattaactccttagactgtgttaatttgttgggtgagtagttaaggtagcagtgtacaacaataaataactcaacggggtaaaagattattattattattttgagatggtatctaactgtcacccaggctacagtgcagtgatgtgatcatagatcactgtaacctcaaacttctgggctcaagcgatcctcctgcctcacccttccaagtagctgggaccacaggcacatgccaccatgcctggttaattttttattttttttcttttattttttttgagacagagtctcactctgctgcccaggctgaagtacagaagtgtgatcttggctcactgcaacatctgcctcctgggttcaagccatcctcccacctcagcctcctgagtagctaggattacatggcatgcaccacctcacccagcgaatttttttttttttttgtattttggggtttcaccatgttggccaggctggtctcagactcctgacctcaagtgatctgcccactttggcctcccaaagtgctgggattacaggcgtgagccaccacacctggccaatttttaaaatttttgagacagggttgcactctgttgcccaggctggagtgcagtggtgcagtctcagctcactgcaacctctgcctcctgtgctcaagtgatcctcccacttcagcctccccggtagctgggacaacaggtatgcatcaccacagccagctaattttttgtattttttgtagagaaagggttttaccatgttacccaggctggtcttgaactcctgagctcaagtgatccacccacctcagcctcccaaagtgtagggattacaggtgtgaaccactatgcccagcctaaattttttgtagagaagggttctcactggtcttgaactcctggtctcaagcagtcctcccaccttggcctcccaaactgctgggattacaggtgtgagccactgcgccctgctcgattattttcatatttgattctcagagtaaacatacagcttgttgataatctgagccccgactgcccatctcatcttctgtctcccattcttggaaacccttttccagtcaatctgtcccaaaacatgtttattgctttcccattttagccactattattcatgccttttatgtcacctctccaaactctgccagtcttttaagaaccaattcaaattttacttctgcctgatgcctttcccacttactccagattgaatggtttttctttctctggatcccaggaaatggtctataccatttattgtcttatggtttggctattttttttaagtgtaaatattgtatctcaagtaaattataagatcctcgtcagcaaagacagtacccattccttttgtttcatcacattttctttgctatgtgagtatgcatttgatttgggtgatggacagttcagtccttaattccaaagattatggtaatacaaaaatgattaacactctgaaatatgcagaaaggagggaatttagctgctgtataactagatctatcaaatggggacctttctcttttactcagctttagagattctgttgtccttgttgagtttgatggaatccttctgtaagatactcttcatgtggtaaacagatgagtagaataggggtattgcttcagattctgacaaatcatacacagaaaatgaaaatgccctctatgtctcactcagattcaaaaagattataatccccttttacacctaaatgccctaacacatcatttttgcatattactaattaaggttctctaaattcatctggattttacagatgaatgaattggatgaataaggaccttgaactctatttccaacttttcttctctaatttatctttattcaaaaggaaaaacaaaaaccctaagaaaatttactttagcatttattaatatgaaaatggaagcattgggttttaagaaaatgttttgcttaaattcagtggtttaataagccagagaatagtgttcccttcttttctttttttttttttttgagacggaatttcactcttgttgcccaggctggagtgcagtggcactctctctgctcactgcaacctctgcctctagggttctagcgattctcctgtctcagcctcccgagtagctaggattactggcgcccaccaccatgcctggctaatttttgtatttgtagtagaggcggagttttaccatgatggccaggctggtctcaaactcctgacctcaggtgatccacctgcctcggcctcccaaagtgctgggattacaggcatgagtcaccgtgcccggccagtgttctcttcctttttttttttcttttgagacagagtcttgctctgtcgcccaggctggagtgcagtggcacgatctcggctcactgcaagctggccttccaggttcacgccattctcctgcctcagcctcctgagtagctgggactacaggtgcccaccacctcgcccagctaattttttgtattttttttagtagagacaggatttcaccatgttagccaggatggtcttgatctcctgacttcgtgatctgcccacctcggcctcccaaagtgttgcgattacaggcatgagccactgctcctggtcgtgttctcttcttattgaaacttttatatcccatccttcctggcctatttggtaagtattaatacattcctctggaaaacttccatgtctacctgacatggaaagtgcttcctacatagatatatttcttgttccacccctcccaccccccaactgagtcttttcaagtgtctaccaaatgcaaacattttaaccagctgctaatgggaactcatagctttgaagacttagaaatgtaagatattgagaaatacgaggttttaaggaggtttgaagaatgcttttttgctttctgttagttacgatgtatatttccatttatttcccctattgagattaaggaaaattgtgataacaagtattttacttcctttgcttgtagttctgtatgaaattatttccttacagtgttactagttggtggtgttctgtatgtgattatttgaaactcagtgtgttttcagaagttgttgaatattctcaggtggagatggtcatttttattatggataatggtggaagatttttgtcttagggggcattctagattacagagcacacaaacatttcctacttcggggagagagggatgaggttgctgtgttggaagagtgatacacacgctgtgttggaagagtgatacacacacttccaggcgtatgctgatagagctgttgacagtatgaactttcccagtcatagtaaatctgggatcacggtggcatttctaggtcctacaaaaatgtgtgctatcttgggaatgttaccacttcttgccctgagtgtttcatagaggtgttaaaaaagaaaacaccctccttctaccttccagttgcggcactctggtggggaccttgtgtcttggttaaacaaatcacaaacaactctagatgcttggtgacagtctgaagaaggcacgtagatatttgcattatgttttattacagcatgtatttgtgactgagaaaccaaaatacttctgaagtattttcctctctgaagtagttgactcttggcataaaatgggaaactttgaagtcctgtgtttctgtttttctaatgaaatatctctgtacagctcaaagataaaagtaattaccatttttaaaggatccttctttcccctctgttttaactcttccatttaaaaaggattagcactggaaaattattagaatggacattcagattctgttgtgtatcttagttgcctgctaagaacactggttcccatcacatttaaactctaaagacattgtgaagtctggatatgcccggtctcctactttctctttctttgtggccttcagatcattaaatttagtgactcagctaattttttttacccacctcttagaactaagttgaatgtatttgtgaccaagcacttaaagttatttcctctaaaccaagtgtttgagatgtttttagatttataacagtctttgtttaccgtgtaattcagtccaattgaggaactagtaaaactgcattatctagacatcaaagctaagaagagtatacttacaccaagaaacttattaggtttctaacaagtggaaagttaccaggtgtcccaaaattaaccacttccatgccagctgattttcactttttgtagctattttaatgatcagcagcattctgggtttaaaaataacagtcgtggctgggcacagtggctcgtgcctatgatcccagcactttgggaggctgaggtgtgagtgggaggattgcttgaggccaggagtttgagaccagcctgggcaacatagcaagaccccatttctaaataataataataataataaattagccaggcatgatggcttgcacctgtagtcccagctacttgggatgctgaagtgggaggatcacttgagcccaggagttggaggctgcagtgagctatgattacagcactgcactccagcatgggtgacagagcaagactccatctcataaaataaaataatcagttctacattattcagagttgagtgttgctttctttagcatccttcaaataactgaaaatatgccattaaaaaatataaccaaggtgttgaatggataatacattttagttcatttcaaaatagagccaatatctttatttcttgaggtttgagagcaggctggtgttttgttctgtttttccttcagatttctgtgaagggataaatattagacccactttacagagaacagttgagtcacagacaagggatgacttgccaattgcatgcagaggtcactttaagtaggaccagtgctaccaagttgcatttcaagattggtaaccttaagacctgacagaccctggggtcaggaattgatagagaaggactctgttagatgaggacccatgacttcctcaacccttcatcagcactcctgtctgaggctctgttcaacctaagtttcttcatggattgaaacaaaattatatgtgcatattacagagtaattgattgtgtacagatgcttcctttaggtatttcagaggatgtgtgtaaacatgctttagatattcataagcatcttataattttgtttatgtaagcaatcgcctagaaaagtagaggatgcgaaaggtttgtttttctttcccgtggataccttgcttgttcctgctgaattctagaacatggcatctttaggaacatgccattatctggaggcaattgcctacagtcattgagatttttctttttaaaatgtagtttttgcatactacgtctagtcacattttgtttccatagagggtttggctttctgggatatcagaaggaagctatggatgtttggaaaaggtctgtgaccttttgaggttatcatcacaggggacaattgcactctcccattcattgctccctggtgtcagtcagaataatgcgtggtggtctgacttccagtggcatttcttatgcaataggcttacaaaaacataatgaggtcatggcaagcctaggttcctacagacataaatgagattcagaagaaaattgctctgttcatttcagattctcctctttgtgattgtcttgagagaatgttcatttggctgcaggttcagtgcttgcacagttatattggagtatctaagtaaactgaagtgcagcataaactgtcgtagctggaaagttgctaaagactgtaagccataacagtttgtttaacttaagctgttaaaactttaggttctttaaggtgccatttttttggccacattctgtggttccccatagccttcaggaaggaatccaaactcttttttttttttttttttttttttaagatggagtctcgctctgtcgcacaggctggagtgcagtggcgtgtctcggctcactgcaagctccacctcccgggttcactccattctcctgtctcagcctcctgagtagctgggactacaggtgcccacctccacacccagctaatttgttgtactttcagtggagacggggtttcaccatgttagccaggatggtcttgatctcctgacctcgtgatgcatccgcctcggcctcccaaagtgttggaattacaggcgtgagccaccgcgcccagcgaaggaatccaaactcttaaagtggtttgatccagtccctggttccttgctaatgcatcttacccattctttccccacacacactttgttccagttggttctcccaactggcagtgcttttttttgcggagggaagggtctgtgcacactctgtccctctgtcttaaatgcacttcatacttcaggtctcacctgagatggaacttcctacagaaaggctttcccgaatctgaaaggctgggcttggggaccttttaatatgctgaatcatcattcagttattgattctttcagtgaatatttgtgtcaagcactgtgtcataggctgaggacacagaatagaactaaacaggggacaggcctcacagagcttgcattcttgtcagggaaaccatctcgtatttacacacttaatttttttttatttggaaatgattgaaaacttgtaaaaatagcacaaaggaatatcctatatgctttacccagattcatctatttttttttttcagattcatgtgttgttaacaatttaccaccccatttgtgttcttactctttctgtatacataatttttccagtgggatcagttacgtacattatggcccttcccctcaaaatactaaggtgtcagtttcctaaaagtggagacattttcacatgatagattttatagatttacattgataaaatattttatttgggaggatttatccttcctgcatttcttttttttttcaatcttttttttactgtgttaaaatacacaaaacataaaacttgccattttaatcatttttaactatacagttcagcgatattaaatactttcatgttatgcaactatttctgtaacactttccatcttgtaaaactgaaactctgtacccattaagcagtaacttttcattcccactttccccagcccctgacaaccactgttctactttctgtctctatgagtttgactactcttaagtactgcatataagtggaatcatatagtatttgtctttttgtgactggcttatttcacttagcacaatcaagattcagccatgttgtcagaatttccttccctttaaaggctgaataggccaggcgtgatcgcttacgcctgtaatcccagaactttaagaggccaaggcaggcagatcgcctgagcctaggagtttgaaaccagcccgggcaacatggtgaaacctcgtctctactaaaaatacaaaagttagctgggcacggtggcgcatgcctgtaatcccagctactcgggaggctgaggaaggagaatcacttgaacccaggagacggaagttgcagtgagccaagatcgcaccactgcactccagcctgggctacagagcaggactctgtctcaaaaaataaaataaaaataaaggttgaataatattatattgtatgtatatatcacattttgcttatccattcatgagtaggtggatactttgggttgcttccatgttttgttgttgttgctgttttgagatagtcttactctgttgcccaggctggagtgcagtgatgagatctcagctcaccacaaccactgcctcccaggttcaaatgattctcctgcctcagcctcccaagtagctgggattacaggcacatgtcaccacacccagctaatttttgtatttttagtacagacggggtttcaccatgttggccagactggtcttgaactcctgacctcaggtgatccgcccaccatggcctcccaaagttctgggattacaggcgtaagctaccacgcccggcccaggttcctgtttttgcagtgggtttataattcattaccatacttaattattgtggcgctcaaattgtcccagagttggccagtgggagccccttcaggctggcttctgtgtccttgtgagatgctccatcgttttttttcttgcataaaaagatgttccaggctcattttgtccctatcctgccctaaccctggaatcagccctttttccagggagccctcacacccttgttttagcacttagcacactgtttacttatgttttcctccactggactagattgtacctctctggggacacatagatgtgagtcttacttgctcttgtatcttcacccagcacaaggcctgacacatgagatgtttactaaatatttgttgaataaaaaattaatttttactgtagttaattgattaaaatttggttctaaaattatgatgctgatgggttttctttttttttcccccatctaggaagaaatgttggctatttggcgatgagaggtggtgaacagtgaccatactggtatacaacactatgggacctggcatttttgctgcatgtccagcccacccccactaataatgtaggaagctgtctggtccattggaaacactaatctgatctcagaagtggctgatcgtggcaggatgtgtcgacgatgatgatggcaagaaagcaagatgtccgaattcccacctacaacatcagtgtggtgggattatctgggaccgagaaggaaaagggccagtgtgggattggaaagtcttgtttgtgcaaccgcttcgtgcgcccgagtgctgacgagtttcacttggaccatacctccgtcctcagcaccagtgactttggagggcgagtggtcaataatgaccactttctctactggggagaagttagccgctccctggaggattgtgtggaatgtaagatgcacattgtggagcagactgaatttattgatgatcagacttttcaacctcatcgaagcacggccctgcagccctatatcaagagagctgctgcgaccaagcttgcatcagctgaaaaactcatgtacttttgcactgaccagctggggctggagcaggactttgagcagaaacaaatgccagacggaaagctgctggttgatggttttcttcttggtattgatgttagcaggggcatgaataggaactttgatgaccagctcaagtttgtctccaatctctacaatcagcttgcaaaaacaaaaaagcccatagtggtggtcctgactaagtgtgacgaaggtgttgagcggtacattagagatgcacatacttttgccttaagcaaaaagaacctccaggttgtggagacctcagcgagatccaatgtaaacgtggacttggctttcagcaccttagtgcaactcattgataaaagtcggggaaagacaaaaatcattccttattttgaagctctcaagcagcagagtcagcagatagctacagcaaaagacaagtatgagtggctggtgagtcgcattgtgaaaaaccacaatgagaactggctgagtgtcagccgaaagatgcaggcctctccagaataccaggactatgtctacctggaagggactcagaaagccaagaagctgtttctacagcacatccaccgcctcaagcatgagcatatcgagcgtaggagaaagctgtacctggcagccctgccattagcttttgaagctcttatacctaatctagatgaaatagaccacctaagctgcataaaagccaaaaagctcttagaaaccaagccagaattcttgaagtggtttgttgtgcttgaagagaccccatgggatgccaccagtcacattgacaacatggaaaacgaacggattccctttgatttaatggataccgtccctgcagagcagctatacgaggcccacttagagaagctgaggaacgaaaggaaaagagttgagatgcgaagggcgtttaaagaaaacctggagacttctcctttcataactcccggaaagccttgggaagaggcccgtagttttattatgaatgaggatttctaccagtggctggaggaatctgtatacatggatatttatggcaaacaccaaaagcaaattatagataaagcaaaggaagaatttcaggagttgcttttggaatattcagaattgttttatgaactggagctggatgctaagcccagcaaggagaagatgggtgttattcaggatgttctgggagaggaacagcgatttaaagcattacaaaagctccaagcagagcgtgatgcccttattctgaaacacattcattttgtgtaccacccaacaaaggagacatgccccagctgcccagcttgtgtggacgctaagattgagcacttgattagttctcggtttatccggccgtctgaccggaatcagaaaaattcactctctgaccctaacattgatagaatcaacttggttatattgggcaaagacggccttgcccgagagttggccaatgagattcgagctctttgtacaaatgatgacaagtatgtgatagatggtaaaatgtatgagctttccctgaggccaatagaggggaatgtcaggcttcctgtgaactctttccagacgccaacatttcagccccacggctgtctctgcctttacaattcaaaggaatcgctatcctatgtagtggaaagtatagagaagagtagagagtccacgctgggccggcgggataatcatttagtccatctcccccttacattaattttggttaacaagagaggagacaccagtggagagactctgcatagcttaatacagcaaggtcaacaaattgctagcaaacttcagtgtgtctttctcgaccctgcttctgctggcattggttacggacgcaacattaatgaaaagcaaatcagtcaagttttgaagggactcctggactctaagcgtaacttaaacctggtcagttctactgctagcatcaaagatttggctgatgttgatctgcgaattgttatgtgtctgatgtgtggagatccttttagtgcagatgacatactttttcctgtccttcagtcccaaacctgtaaatcttcccattgtggaagcaacaactctgttttacttgaactaccaatcggactgcacaagaagcggattgaactgtctgttctttcataccattcctcctttagcatcagaaagagccggttggttcatgggtacattgttttttattcagccaaacgtaaggcctctttggctatgttacgtgcctttctttgtgaagtgcaggatattatccctattcagcttgtagcactcactgatggcgctgtagatgtcctggacaatgacttaagtagggaacagctaactgagggggaggagattgctcaagaaattgacggaaggttcacaagcatcccctgtagccaaccccagcataaacttgagatctttcacccattttttaaagatgtggtggaaaaaaagaacataatcgaggctactcatatgtacgataatgctgccgaggcctgtagcaccaccgaagaggtgtttaactccccccgggcaggatcaccgctctgcaactcaaacctgcaggattcagaagaagatatcgagccatcttacagcctgtttcgagaagacacatcactgccttctctgtccaaagaccattctaagctctctatggaactggagggaaatgatgggctgtctttcattatgagcaattttgagagtaaactgaacaacaaagtacctccgccagtcaaaccaaagcctcctgtccattttgaaattacaaagggggatctatcttatttagaccaaggccatagggatggacagaggaagtctgtgtcttctagcccctggctgcctcaggatgggtttgatccttctgactatgctgaacccatggatgctgtggtgaagccaaggaatgaagaagaaaacatatactccgtgccccatgacagcacccaaggcaaaatcatcaccattcggaatatcaacaaagcccagtccaacggcagcgggaatggttctgacagtgaaatggacaccagctctctagagcgagggcgcaaggtttccatcgtgagcaagccagtgctgtacaggacgagatgcacccggctggggcggtttgctagttaccggaccagcttcagcgtggggagtgatgatgagctggggcccatccggaagaaagaggaggatcaggcatcccagggttataaaggggacaatgctgtcattccatacgaaacagacgaagacccgcggaggaggaatattcttcgcagcctaaggaggaacactaaggtaagacaccagtctaggattagtcatagtgttttgtacagcgtctcggtgagggttgattgatgatgatttttcaaggacaacctattctggtaaaaaaaaaactgccctgtgtgtgtatttgacttaacataaaaaagcagtgcctcaattagctaccattattggcagctctcaagtagttaggactttggatagatagtctgagttgttgttgcctaaaacaatagttaattaattagcaaaatgaggagataatgcagaacttgtcagtgtcttgacaagtggccaagcgcagtgacaatacacttgctctcccttcactgaaacaccagaactcaaaactgcttgccgcagtctctcactgctaaacataacatttcatccatacatctcttaaatgatccttcctcccttgctgatctgtaaaggttgctgcatttgagattggtgaaggattggatgatgatttgcacacacaaatcagtgacgagtctttgagtacataaatgaaaaaagagaatcttgccactgagagttataaacctgtcccgtatttgttaaattggaataccatccagtctattattttatcttcaagggagttgctgctgctatcagtcagaaactcggattttatttagggatcacaaatggtgcagggagagaaaagaaaaagttaactgtatacattataaacattgggcctactcgtcatatgtagagacaggagcaaatgaagtctcttttttttttttttttttttgagacggagtctcgctcagtcacccacgctagagtgcagtggcgcgatctccgctcactgcaagctccgcctcctgggttcacgccattctcctgcctcagcctgctgagtagctgggactacaggcgcccgccaccgtgcccagctaatttttttattttattttattttttagtagagacggggtttcaccgtgttagccaggatggtctccatctcctgacatcgtgatccgcccgccttggtctcccaaagttttgggactataggcgtgagccaccgcgcccggctgcagatgaagtctcttatcctgcgtagaattgtagtttgtagtctgcagggcagagagctgtaagcagtactctgtccccttgggtttaggctttgagaaagaaaaagcgtttctcaactttttctttttcttttttttttccatttggagtagggagaaatactcttcccccccacccccaattgccaaggctgatttagaaatactgaaatactctttacaggccaggcgccgtggctcacgcctgtaatcccagcacttttggaggccgaggcgggtggatctcttgaggtcaggagtttgagaccagcctggccaacatggtgaaaccctatctctactaaaaaagtacaaaaattagctgggcgtggtggcaggcgcctatagtcccagctactcaggaggctgaggcaggagaatcacgtgaacctgggaggcagaggttgcagtgagccaagttcacgacactgtattccagcttgggcaacagagggagactctgtctcaaaaaaaaaaaaggaaaaaggaaaaaaaatgtgtatatatataaatactctttattttttcagaaaaagacattttggtgacatgccacaacagaactgtgttatataataatccttcaccagcagattatgatatatagaaggattttttcacgttaaagcttttgctactctccctcccatgaaagaacagagaacagagttacttgtctgaaagtactgcagggacctctggaaagaaagattgccagaaacttttattattacaaatcctaccaaatcagaaggttctagaatccaggctgtcttgagagctgacaatcctgacaactctgttgtaaaatgtaatacagaggccagtttggcagccctgcgggccccgagagatggaggaacagggtgccatcaccctcccacagaaattgcatccactttgtgctacatcccatagtagagagtgttcctgcattaccgctgaccaggagcttccagagttttctcatctgtgcagtgtgagaaagggcagagtggttctgtatccctccccacctgtgctgactattaataaatgccataggcatcctcctgtctgattttcctttgcctggcttttctacatggagtcctttgtctgcctccagtgttttctcctccaaaggttggtaggaggccaccctgtggaaagcattgcttatttaggaagccagaaaacggcctgacttgcctccggtattttcccagagctcacctatttaatgatactggaatccaaacattttgaacatttcttctcttcctcctcctctcccaatgaagactgttgccagaacagcttaaaaatgctgacagtcttctaatttgtgggggtgtttgcacacctggaaattaggaaggtggcataatagcatactgaattataactatattctgacttctagctacatttttaatacttactgaaaatgatgctttaaaaacacattcccatgcaagccaggctttaaagagcacacactgtagtggaggctcagcagaaaacagctgatcacagtgtgcctctaagatagctgtgttcatgctggtaatgagcacttcctaacctgagacttccttccccgggttgctgggtcagcgtgcaagaagtggtcggcttccggtctatctttagctatgtgggccacacctcttcaagtcaaataaaaatgatacttctggcccaagagcaatagcgtgccagaagtcagttatggagtatcctctggaaagagtgactagaaggtgaaattttcttttcctgccttggaaaatggtgctttgaaatgagggtagttgctttgtcatcccagtgcagagatgagcaaatcctttgccgctagagcaaacctcctattaaaattgctgcagttcggaacacagactggcacttgttttactggaaaagcaagatgccatcaggggagagaagggccaagccaacccctgtgtgggagatttggcctttggtttttattggcatgacaaagcaatacaatatttatttggagggagggggcagctaggcactaggatttcagttggtaagggaaaatacactgagtacctcctgcgtgccaggcaccatagggaaatgacacagacccttcttgcccagaccttagtacccagttgaggcagcaaggcctacacagccactgaaaataggtggcctgcccagggaaggctatgtgtgggcatgtcgggttagttatgttagagtaggttgtagtgattaggagctcaggctctgggaatctgggctacagtcaactccagctcctccgcttccttagttggactttgggcatgtgagtcacttctccacattctttctgcaaaagagggagcaccttcctgatcaggttgtgagaaatgaacaccgggcgtagtgcatgctggataagtgtcagctgtcatcatttaactagaccccagagaatgagtggaactaaagcagtggcatgaggtaaggaaggacttgaaggtggaaatatgcatattgtattccgagaaaggagaaaacttgtctggtctagctgagggcttgagggaccaacattatccgtcccgtcttttggaagttttaacctcatgcattactgagctgctttcttggtacttaccctagcaaccaccctaacaaaaaaatagctatgctctgggtaccaatgtgatacagaaaaaaatcactcagtgcccttggctgatttgctagattaggtctttactataaaactggagtcggagtgagggaatcgctttcatttctcctcatgaaagtgcagactgtaaagctgactctcattctgggtgcttttcccagctgaaccatttagcaacccaccctcatagtgggagccttccgcactcagctgaatgaaattgaaaatctacgattgcacttcagtagggtccatgaatagtggctttgtctgtaaagagttgttgttgcacatggtctctgtctcccagtgccatgcgtttgcaaagacgagatcaggatcggcagggtcttattttaaagccaaaaaacaggctggggagccttgttccacaaagtatgccttttggtcatgctgaaatggctgcgtttggtgtgtttgactgtggatttaaaaagaagacattattggctatttacccttctatctgatgtgttcttattttggtgctaaaaaaaaaaagacaaaacagaatgataaagaaaatctttcactcactgcagcaaccacatgacaagacaacctattgaaaagctaaccaattcaatcatgcattgtttggtctataaggcaccaagtaaccagtttgacagtttgtgtccccccctagtgaattggcttatttcattggattcagtgaattggctggttgttgtggctttgtgtggacacagctctcattttgtgaggcctagaatggagttaaagtttctagtgtgaataaaaaccagctggggaattggactgcttgctcccctgggagggatgttgagttttgacagacaagctgaatgcgatgaaatatgagctctttgtaacctgcctaggaaagactctcagtgtgtgcttcagaaatagtcctactcaatgagctttgagaccaaatacataacttggttttaaaaatggggtgggcacactgacttgaccttggattttctgtttcctggaaaaattgtgtcttttaaacgaggtacttttgtttccaagccgaagttcagtcattcttttaggaaggagacatgcatttcggtgcgtgggcattcagtgagcacttgttttatgcccagcattgtgttgggtgccctaggtgtggtagtgacgttaatccagcttacagtcttggggatgttaggttttaaacatgtacttgcatgcattttgaatattaccagagggaaggtacaggatactaaggaattgtgtaacaaggaagtttaacctaaactgcggtatcaggaaagctccccaaggaaatgatatttaaggctgagactttggaagctgaggcagacaaagtcagtgaggatggaagcttcatggagctgaaagaacttcatgtgttcaaagagttgaaagaagcttagcgtggctgctctggagaggtgagggggacccacgccaaataatagagggctgtggctaccacgtgaagggttttgtgtttttgtgcatttattgaatacttactgtgtgccaggtacgtgtcaggcattttcacatcaattttttatttattcctcctcccagtcttaatgaggtgatgtttttcatccttgattttgagttgaggtaactaaggctcagagagattaaaccttgcccaagtgagtgtagccactgagtggaagagctgagattctgaaccctggtgttctgacttccacttcctgtggattttcatcatccagtctgcagaaaagttgctaatattcaacagtcaggtgcctatatttagaccactcaatcagtccagtcgatttgttcattcaaacaaaagatctttgattatctgaaaaaatccatttctcctcactgccccccagaacagcacggtgctgtttgtttctagcttcagagcctagttgagtagaggacaaaaaaggcatggagacattgaaatagcaactggaactttgagaaattgtttctcactggtgtcactcgattctcagtttattttaagcctgaagaacttctgtagtgtgtttttggtgataaaaatagactatctttaactatctgccttagcttacagcatacctgttcttaaaaaaaaattacgataggcaacccaaatctgtttttaaaagaactgggaattgtgctgatgcctcactgagccaacttggtctcctccaccacctggtgatactgaaatacctttgtagggactcaaattattccagctctagtcaggaatcacctttgcttataaggcaaaggccttccaaatggattttctacagcatttgagagaagcaagcaataagaactgacccatagcgttggaaagtccaaattcagtgtgtgttgaacttcaggcaagtgttcatgaaaatgtacctggaactagtgggccctcctcgctgtttggctccagatcacactggccacgagttgtcttctcgggggggtggatccgcggtcaccagacttcatgccttaatagaacaaaaagctatggtctgcgctgggcgcggtgggtcacacctgtaatcccagcactttgggaggccgaggcaggcacatcacttgaggtcaggagttcgagaccagcctggccaacatggcgaaaccccgtctctacaaaaaatacaaaaattagccaggtgtggtggtggacgcctataatcccagctactcgggaggctgaggcaagagaatctcttgaacccgggaggcagatattgcagtgagccaggatcatgccactgcactccagcctgggcaacagagggagacggtctcaaaaaaaaaaagctatggtctggatttagttaggtcctgcaataggatgacatgtctccgtttctttctccattatttaagattagggatgacaggaaggccaggactttgtggtccttcctgttcatccgtaaataaagatgctccaagatggtgagtgactgagtcatggtattaactgccagcttgaaggagaccatatctaagcatttgtgctttaataatagattttgtcagcaagaatacatctgccttcaggttttcttttaaacttgggcgtggaatttttcagagcccagaagggggagcaccggttaaccaagaatacatttggagcataagcaaataacttaattaaaaaggtccttttggaactcttttggaaatagaagagaataattgccaatcagaaaggcacgatgttgaatactgaatgcaagaaagtggtttagggaacagctgtagtaatgccacttatggaatctttccgattttctaagactctaccagttacagttagtccatagtatgctaccacacaacttggcaagccatgggtgtgaccctctggggctctgtgtattgatttcactctcatcctcattcagatggcactgtccatgttccagactacattccgtatatggtgttacctgttactcttttttttttttttttttttttttttacataaaacattaacgccgggcacagtggctcacacctgtaatcccagcactttgggaggccgaggtgggcagatcacttgaggtcgggagttcaagaccagcctgacaaacatggagaaaccccctctttactaaaagtacaaaattagccgggcttggtggcacatatatgttaatcccagctactcaggaggctgaggcagaagaatcacttgaacccaggaggtggagtttgcagtgaaccaagatcgcaccattgcactccagcctgggcaacaagagcgaaactccatctcaaaaaaaaaaaaaaattaaaaaaattttttaaaagttggggtctcactatgtttctaggctggtctcaaaactcttggccttaagcagtcctcccatctgggcttcccaaagtgttgggattacaggcatgagtcactgcacctggctggtgttaactgttttttaaaaaggccagacatggtggctcacacttgtaatcccaatgctttgggaggccgagtttggcagattgcttgagcccaggagtttgaaactagcttgggcaacatggcaaaactccgtctctacaaaatattatctgggcgcggtggcacacacctgtagtcccagctagttgggaggctgagatgggagaatcacctgagcccagggaggtcgaggctgcagtgagccatgattacaccattgcactccagcctgggcaacacagtgagacgctgtctcaaaaaaccaactagaaaaccgagttccgatgcctggttccccaccaccccacctgcttccagtccagttaaatcaaaatcactagggctggtgtccaggcactttgaaaaaaaaaaaaaaagacaaaaaaaggcagtgaatccaacaggctgggttctgttttttatttcctttattagatgtgttaccaagcatttaaaaggtttaaacggctatactagatggtacaactctagtgaacatattttctgactctaaaatctagataagtaactttacatttataaggttgtttatggagaccaaaagagaatatttgaagttgacagcgtagggtcagtaagtagccctccctgctgttcccacagaagatagaatattcttacctttttccattgttgcatagctggtacttgctcatgtggtacctagatgagctttgtttattgtggatatgtcttctgttaccaaatagattggaagttcattgagggcgggagacgactttggtcctagtattagctctgctgccagtttgttatgtggccttggggtgattcataaattcattaaaaaaaaacaaaccaagactcttgccttctaggaacttagcctagtagaatatttgttgtatgtgtacgtaaataactgtacctcattcagtacctacagagggaattaggacttcatctggcggtttttaaaaggcttatgatatagtactgccaaagtatgaacaaggccttctgagcctcacctcctcacacactagtgtgagcagcacagtgtaaggagaaatgagaatctctaccacagagatagtctgcgtctcagctcaatttgagaaaatagaaaggaacattggcccagtacattattggaaactgtttttgttcagcaaatacattgagtgcccactgcacgtcaggccctggaacccaaccatcttcccagctgatagaaggcccttcttttggctcttacctatcccctggcttccattctactctttttcttgccccagtggacttggacagggtctgtggactgggcttacagccgagtggggagcagaggcagtgacagatgcagcttcctactctgccacagtcgggagtttcctctttatgccctgtgtctgaaaagccgagagaccagaggtagttgccaggcaccatttctccccagtgcaccacgggcataaactattatttataaactttgccatgattaatatcaagaccaaaaatcaggtgtgtttttaagcaaactatgaggtacaaagcaatggactatgttgttcatttttttaaaatcagtctaaaaggccaaggtgaaggtgtttcaggctggcccagtcctttgtgtatggcagtggcatttcttcgtggaggagatagaccatgcaggggaaagagcatggggctttggcattcaaagatcaccgtacactaagtgctggctgtgaatctccatgagtctctgttttctcaactgtaaaatgggtctaaataacccttaccttgcagagtggtcgtgaagttttgaataattgtgcagagcagctaccaccatgcccagccactcctagggaatctctgttccatttttgacccagttggactctaaacttaagaggtggccgggcacggtggctcacacctgtaatcccagcactttgggaggccaaggcaggtggatcactggaagtcaggagttcaagaacagcctggccaacatggtgaaatcccgtctttactaaaaatacaaaaacttgctgggcatggtggctcatgcctataatcccagctactcaggaggctgaggcaggagaatggcttgaactgaggaggcggaggttgtagtgagccaagattgcgctacggcactccagcttgggtgacggagtaagactccatttcagtaaaaataaataaataaacttagaggcacacatgtggagattgttctcagggattgaattcctctggctagatgcttttttcagttcagcctgctaataggtaagtgcctccggaagaagatggatgttgggtgttgttactttctccttttcaaggacctgttgctgaaagtgcacccaataactccctgaagagtgacacacgtctgactgggggcatgagatatctggcaggccactcaggagaatggcatttccatgagaaatatgcccagtaacccttcagatgcctgaagtgttgtttctatcagcagtctggcccagctcttggcatgcaccccaaaccctgattttcttactaggaaggtttagaattcattttgcaagagttccaattttgtgacaccctagagagccttcagttatctcaaggaggtattctgaaattctgtaaaccagagtttgtcttaaaaaatagggagtgagattgaatccacgtcactcagcaaggaggtggggtgatgctactgcaaaagcttaccctccacatccactgttgtaaatggaaggattgaactaaatctggggctctttgaggtgaaagagataggagcagttgtctcagttagccttccgtctctcttatcgctcccaatgtgaccctttggagccatgtaaaagaagcctgctctatagtcaataggtagctctatagctatttgaaaatagctatcagagtgccccattattctctttgccaatttaaagttccctggtattttatatgagtggatctttattacctttagaaacctttggaagtcctccagataatcagtgatcagtgtgccttcttttttttttttttttttttttccgagacagggtctcctgctatcacccaggctggagtgcagtggcacaattttgactcactgcagccttcacctccccagctcaagcaatcctcccactgcagcctctcgagttgctgggactacaggcatgcatcaccacacccagataatttttttgtaatattttttgtagagatggggtttcaccacgttggccaggctggtctcaaactctggcctcaagtgatctgccaacctcagcctcccaaagtgctggaattacaggcatgagccaccaagcccagctagtgtgcttttattcacttactcagtcatccatttatttattctctccatctcaagaattttcactagattataagccgtggtggttaaaagcacaggtttcgcagtcatacagacctgactttgtcaagttactttttctaggagttggcctctatcaaatggagtttttaatacccacacccacaaatattttgaatctggagtgcttgtaaagaatttatactggctgggtgcggtggctcatgcctgtaatcccagcactttgggagtccgaggcaggagggtcccttgagcccaggaagctgtggttgtagggagctatgactgcgccactgcaccgcagtctggatgacagagcgagaccctatctaaaaaagaacttatgctaggttctggtacacagaaactactcagttgatgaaggctaaatttcctggctaagttagattgttagaacacaccagcatcatcttgttcctagtattaagagggtgggggaatgtaagattgaaatttgttgtctgtttcctagaaccatggttagaaggaggctttaaggtgattaggaatagcttctttgcagcttccatttctgttccttcacagcggtttatttggaagcctgttttattgaacagtgctgttagtttcaacaggcatattctgtaggatttgagattgttaaaaacttcaatgatagaagatggatgaatgtgatttaagtacagatgctctttggttattcagattgtatagctaaccttttaaactccaaatgtaaaacttttcgacttttaaccttttaaactttaaattaaaaaaaaataggaaacattttaagtggggagagcattgtttgaatcattgttatctggttgcaacaatgtgtgaaacagaggcactcagcccctcttccccaccccgcccctcctcccggagacacagtcttgctctgtcgcccaggctggagtgcaatggcacaatctcggctcactgcaacctctacctcctgggttcaagtgattctcccacctcagcctcctgagtagctgggattacaggcacttgccatcatgcccggctaatttttgtatttttgtagagacagggtttcactatgttggccaggctggtctcgaactcctgatctcaggtgatccgcccgccttgccctcccaaagtgctaggattacaggtgtgagccaccatacccggccagccctcttatttattattttgagacggggtcgcactttgtcacccaggctggagtgcagtggcacgatctcagctcactacagcctcgacctcctgggctcaggcgatcctcccacctcagcttcccaggtatctgggactataggtgtgcgctaccacgcccagctaattgtttttgtattttttgtagagatggggtttcaccatgttgcccaggctggtcttgaactcctgagctcaagcaatttgcccacctcagcctcccatagtgctaggattacaggcattagccaccatgcccagccttaaattctttatgttatacttcatataagtagaagatgctagagacacagtatagactcgttaaattatttcctgtaaatgtatatcatacatcgttaattggcatttccttacttctttggtaaaaaaagtctgaagtcagagcctgtttgcttcagtctataaggggagcaagcagcagccattcccccgaacctaggaggctatgccactactttatgaggagcaggtatctcacagtgagtggggacaggctttatggagtacatggttcttccctgagaccccagaatccattcacattatagcattctccatattgagtcaggtagcaggctgaatgaagattggattctcattgcctttggtttgtcatttgaagtaatctcacccagcagcccagaaatggaatgatcttgctctttccttgtgtacattatattctgatctgttctttttttttcttgctatttgtttgcacaggaagttctcaacgaatctcagactaaacaggaagtgatttttttcttatacaaaggggtactggtaggaacgaagatgggcaggagaaggagagggaataggtggcctgcggcctggcggttcgttgtttccttcagtggattttatgtaaaatccctaaatactttaggtttatgggctgtgcacatttctgagtaaatctgcttttctaaattggtttcatcaactggaaaatgtaactggattgctggagatacacctgggtctaatttaccttgatcctatttggttacttttcttttttagtagatattttaacaaaaggccaaaatttcaagtgtatttctttggctttaggaaatttatcatttgtttagagtaattttttctccatttaaggttcaaaataaaaagattgaatacttttgaggcagagtatctcagtattaatcatgttaatgagcataggctttggagacaaaccttcctggatttgaatccaagcagtcacttagtagttgtgtcatttaggcatgtgagagattttttccttggtaagattgagtgtcatcaggtttaaaagaaataatatttggcaggctgggcaacatagtgagaccctcatctctacagaaaatttaaaaattagcctgggtacatgcctgtggtcccagctttgggatgctgaggtaggaagatcacttgagcccaggaggtccaggctgcagtgagctgtggttgtgccactgtactccagcctgagcaacacagggagaccctgtctgaaaattataataataataataatatttggaacttagtctgtgcatagtaagttctcaagtggttgctgttgctgctgctactgctgctgctagtacttcttgaagaaggtgactagggaaaaatagacaaaaaaaatactttatttgtcttgtttgattagtcgactttaccttttcctaatgtggatgcaactgagaattaaccccaagctaatgtatcaaaggacattctcatttgggtctatcagccctagcagaatgcctgctctcttttctagaaagaggaaataatctgttttccatttcattttttttaaagattttagctatctttgagtatgtaacatctattatccttgtagggtgtttggaaaacttcctgtttactccagtgcatccctggtagaggatgtagataatcatcgtattgttattttattacataaacatggactgcttcttataaacatctttgttctaataatgtggtctcatactcaaggtgtgactttctggcatcctgtgtggtattcagaggccagaagatagaaaattaaaagtagtgagatgagccaagcgaatctttttaatccttcttgaaatcttttttttttttttttttgagtcttactctgtcatccaggctggaatacagtggcgcaatctcggctcacctcaatctccacctcctgggttcaagcaattctcctgcctcagcctcccaagtagctgggattacaggcgcccaccactacgcctggctaatttttgtgtttttagtagagacacggtttcaccatgttggccaagctggtctcaaactcctgacctgaggtgatccacccgcctcggcctcccaaagtgctgggaatacaggcatgagtcaccgtatccagccacttcttgacattctttctagcagtttttataccactgcttcccttctggaagccttactgatgtttaagttacatgttgatactcactttgtttttgtgcttccctttctctttcctggacagaaaccaaagcccaaaccccggccatccatcacaaaggcaacctgggagagtaactattttggggtgcccttaacaactgtcgtgactccagagaagccgatccccatttttattgaaagatgtattgagtacattgaagccacaggtaagagtattacctcatagcagtttataactttcactgtctacaggatgcttactggagggtcaagccatctggagattctggaatcagttgttgttgattgtgagatgctcttggagaaggagctgagcagtcccaacagttgtcagatgtgtagattctccatttgtgtgcagttttgaggctgtcgttgggcatttattaggccttggcctacgaaggagctgttctgtgctcaaggtggcagctatggctgcttgggcgctttctctgtgctacctcacccaccagagcatcagcactctgtcagttgcctgcccgcctgtgttccctgcagatctgtgaactccttgagggttgtgctatcattgtgtcctcagtactatagtggatacataatacattttggtttagtaaaattaatacagccctcagcattgttcggatgcctgagacccatgtattgataggatttttttctgaggtaagaaaatgattaggatgtttgggatatcttctggttatgccgctcctctgacaacttgatgctatcacaaaggtagactgtcttgggaaatttttttgcattgttcttgaaataattaagttttacttgtgttgaaaccatttgctttattcatttgagctctcatgtgtccctttggccttccagtttcactaaggtgggttcttgagcattcggagttgggctcaggaacacaggcttaaactaatttgaaactaaggtagggattacagccttccaatctgttctttctaactctgatattatctacagtggtattaagtattgtgtggtgtggacagcctactaggctctgctgataatttcagcagcatcgtgtgaagctgagtgacagtgttcatatttacttaggatgttgtaaagcagggaagatggctttatttattattttatttttatttttatttttattttttgaaatagagtctcactctgttgcccaggctggagtgcagtgacacgatctcaactcactgcaacctccgcctcccaggttcaagcgattctcctgcttcagcctctgagtagctgggattacaggcgcccgccatgacgcccaactaatttttgtatttttagtagagacgggtttttgccatgttggccaggctgttcttgaactcctgacctcaggtgatctgcccgcctcggcctcccaaagtgctgggattacaggcatgagttacggtgcccagccgaagatagcattttttttttttttgagatggagtctctctctgttgccaagctggagtgcagtggcatgatcttggctcactgcaacctctgcctcccaggttcaagtgattctcctgcctcagcctcctgagtagctgggattacaggtgcacaccaccatgcccggctaatttttgtatttttaatagagatagggtttcaccacattggtcaggctgtctcaaactcctgacctcgtgatccgcccacctcagcctgccaaagtgctgggattacaggcatgagccactgcgcctggcctgaagatagtttttaagttggagcccaccaaagactttgtatttatttcctaggttttctgtggaaaccagagaaataattccccccaggcttgaatctcagtaataagcacttggcataatcattacagatctatagctttgtttagtccattctgtacccaaagcggtttctcattgtccatcttttttttttcctgctgtagacacaggggtctcacttattgcccaggctagtctcacaatcctagcttcaaatgatcctcctaccttggcctcctaaagtcctgggattacaggcgtgagctaccatgcctggcttcagtgtccatctttttgacactcgttttatattaatttcctcctttatctgtctctataaaatgtttgaaagttgcaggtgtgatatgcacctttacatttatttatttatttatttatttatttatttatttatttattatttaatttttttagatggagtctaactctgtcacccaggctggagtgcagtggcacgatctagactcactgcaacctctgcctcctgggttcaagcaatcctcccacctcaggctcctgagtagctaggattaccggcatgcaccaccacacctggctaattttttttgtatttttagtagagatggagtttcaccatgttggccaggctcgtctcaaactcctgacctcaagcaatccacccgccttggcctcccaaagtgctgggattacaggcgtgagccaccatgcccggcctgcacctttacttttaaatacttcagtgggtatttcccaaaaacattctcttatagaaccactgtgcatttatcaaaattaggaaatcaacattgatctagtactaatctgtctgtaatctaatctatagacattctcatttcatcagttttcccactaccttcctttatagcaacagacaaaacactgttttggtccaggaccttatcctggaccacacgttacatttagtggtcaaatctggcccagcacagtggctcacgactgtagtcccagcactttgggaggccgaggcaagcagatcatgaggtcaagagatcgagaccatcctggccaacatggtgaaaccccgtctctactaaaaatacaaaaaattaggccggggcggtggctcacgcttgtagttccagtactttgagaggctgaggcggaagatcaggaattcgataccagcctgaccaacatggagaaacccagtctctactaaaaatataaaattagccaggcttggtggtgcatgcctgtaatcctagctagtcgggaggctgaagcaggagaatcgcttgaacctgggaggcggaggttgcggtgagccaagatcgcaccattgcactccagcctggccaacaagagcaaaactgtgtctcaaaaaaaaaaaaaaaaaaattagctgggcatggtggcacgcacctgtagtcccagctactcgggaagctgaggcaggagaatcgtttgaacccagaaggcagtggttggaatgagccgagatcacgccactgcactccagcctggcgacagagctagactccatctcaaaaaccaaaaaaccaaaaaaataaaatcaccaatcagttattttgtagggtgttcctcagcttagctttgttttcccttttttttttttttttaattttttgtatttttggtagagatggggtttctgtgtttcccaggctggtctcaaactcctgagctcaagctatccacaagcctcgacctcccaaagtgctggcattacaggcgtgagccactgtgcccggccttggctttgttttagttttttggatatttcatcgtgatcaagttctgggtttgcacttctggcagataccacagggcagcaatgcctttgctctgtcccctccacttcatctctgctgcccaccatcacccaccttctcagtccagtctatgggtatgacagtttatctgctgaaaacccatccttgcttctttgttgcctaccagatgcaggtcgcactcataatcctccttcccggactcaggaacagcaagactgttactatgccattgtcccctgccctccttcccaccctccttttttttccctctcccactcccttctttcacccctttctttctgttttatgctgcttcaagtattaattttaaaattgttctacaagaatgcgatttatcagaaggatgtgaaccaagcagaatttcttagtatttctttgccttagggcattccccttgtgtggtttaaaatttgtcccccattcctttttgcctgtggaacttatccttattcttcaagagactcctactcctaatagcactttgaatttaacctccctggtagttcttctcagccaaatttcaccttcctgaaaacaggattctctgttctccttgtctccctagagcccgatacagcatatacattaattgattattgtaaattagccaggcatggtggcacgcatctgtggtcccagctaccctggaggccgaggtgggagaattgcttgaggccaaaggttcaaggctgcaagtgagctgtgatcataccactgcactccagcctgggcaacagagcgagaccctgtctcttaaaaaacaaaagagagagagaaagagacagggtctcgctctgttgcccagtctggagtgcagtggtgcagtcatagctcacttgcagcctcacctttctggcctcaagcctcttgagtaactgggactacaggcatgtgccaccatgtctggctaatttttgtattttttgtggagacaaagtctcactatgttgcccaggcaggtctcaaacacctggccttaagccatcctcccaccttggcctcccaaagtgctgggattataagcatgtgccactggacccagccagagaccctgtctctttaaaaaaaaaaaaaaaaaaaaaaaagatagattgaatgagtggttttcaatctggaacaccttaattccattttcgtctttcttcaagaaaaaaatgaccatatatttccccttgttggcattagtttgtacttttatggaatttcagaagaaaaattaaacctggtatctgtgagcttagtgtgcattggagggatgtctttgtgtacccttatttcctaagaaaactttttctcccttttataaaattaaagcaagttcattgtagaaattggacaaatggcaagaactgtgaagaggaactcaaagattcgtgatctgctacttagtgaaaaccaccgttaatgatttgagatgtttcttgtagtcttatttctctgcatatacacatatatttattttcacataattcagagtatgaggtaagctagctttcaacatttttttaacatagccctcttagatgaggcagaagaggccgggtgcagtggctcacacctgtaatcccagcactttgggaggccgaggtgggtgatcacttgatgtcaggagttccagaccagcctgaccaacatggcaaaaccccatccatctctactaaaaatacaaaaattagctgggcttggtggtacatgcctgtaatcccagctattcgggaggctgaggtgggagaattacttgaacccacgaggcggaggttgcagtgagccgagatcgcaccactgcactccagcctgggcgacaaagtaagactctgtctccaaataaataaataaataaagcatgcatgcatgccaggcatagtggtgtgcacctgtgatcccagctatttgggaggctgaagcaggaggattgtttgagcccaggagttccaaggctgcactgagctctgatcgcaccactgcaatccagcctgggcaacagagcaagaccctgtctcagaaaaaaaaaaaaaaaaaaaaggaaaagaaaaaattaccattaattcagtagtatcatttcacatacagttcattttaaaatttattcatttgacgtaaaactatatgttatagctgagctttttgtactaggattcaatcaatagtcacactgcacttggctttgcctctttaggcccttgccgtccagaacagtcctctctggcttgttttaataatgtgattttttttttttttttaaagagacagagtctcactctgtcactgaggctggagtacaatggtgcagtcgtagctcacggcagcctctaactcctaggctcaagtgatccttcctccttttcttcctgagtgctacaggcatgctccaccacactcagccaatgatgaccttttttgaaaagcctagtcagttgtcttgcagaatgtcctcttcatgtaatgtgctctttggacctcttcagcatcctcagctgccttccaggaccaagtgtggcctctgactgagcagggggttgagcaccctgcaggtggtggacgcgggactgctgcctccctttctggacagggcacacgtatgaattgggcttacgggctccatagggttgtattgaataattgaacgaattgtgagctagtgttttccccaactttgactgacagatagtgggcttgcactttgcttagggaaagctggtgctgccacctgccctctcaccccatctctctctcttgctcatggttggaatggccatatgaccacacagtttccatgtagtattccaggcagggagtcctagctgattagagatgacattcccaatgaaacttgtttgccaggcctggtcaaagcagtccaaagtcagaagtctttgtgtccctgtttttgtgtccatttcatgtaccttggcactttaaggcttgtcctgcaaaataaaacattgcatcatcacttgtgaaggcagagcttgggagtttgcactgctaagatgaggataggaaagaaatttatgccgcagggcctttgatgctgcccactcacctgtctgcacagccagggcacggccagcgggagtggagaagatgagcgagaccaaaaccttgccgtggggaggagggtggcatagccattgataaatcgggacttgaactatcccatcactctaaaaatattttttatctgattacaaaagtaatagatggccaggcatgatggctcatgcctgtaatcccagcactttgagacagcaaggcaggagtagcattcaagcccattagtttaagaccaaccctggcaacatggtaaaatcctgtctctaccaaaaatacaaaaattagccatacatgatggtccatgcctgtagtcccagctactcagaggctgaggtaggaggatcgcttgagcccagaaggttgaggttacagtaagctgagatcatgccactgcactccagcatgggcgacagagtaagaccctgtctcaaaaaaaaaaaaaaaaaagtaatatacttgctcactgtaaaacaaattaatcattatagatatgtaggacagaaagtaaaaattctttataatcccagtctccaggagtcatctcattaatgtacagattatgcttcctgctaatgctagtcccccaaaacattgaagtctgagtatgagatcatctctgtgctgttccgcagctcattgtctgttttagcagaacatgatatcttgggcgtcacttctgaattccacctccaggccaattggattttggtttttgatgtgaggagaggatgcaagagctggtatgagaggagggtctctggaagtgtgggaagagaagccttgtttgcagaggtggcacgtggcagtttcctgtgactggcatctcccagccccttagtttgtgagtaaagtgccaaatccttctaaacacagatcacaagaaaaaagatcatcactttcttacctcaatttactgctcctgatgtttacaagcagggcgctgtgttgagactcctccccgatattttcccttctcaggttagctcctacattgtgagggaaattggttctgatttgcacctgtcttctttcctgagctttctgaccagttcatttacccttgttcatacttctgaaaatcagaatgtggtcaagaaatgaccagagagtagaacagctttcagattgatctgcagatgcttttaggacagcccagccccggacaccctctgtgcttgctgtgctaataggatattcgactttcactctctcagctccggttacatggaaaggctggatgagggcatgtcactgccacagctgctctgggaccgccactgagagtgggaaggaggcggggttgagggggagcttaggaggcggggttgagggggagcttaagagtcagactaactttctatttctagcttgaatgctttttttcctccagttttcatctttgtggaaaattggttgaggcaatggagtcactgctcccttctgcagcagtgtggctcctaatgacagagaacattggccaagctcatctgagctctctgatgcacagcaggaagtagaattattcaattcagtgtacctctctggaatggggcaagaggttacttttagagctggctcacaatcctcctgagaataatttctcagggtaaagtacactcttgatagctcatggtggtcacaagactgaggttttaaatcctgggtctcagggccaaatttgagtcaagccttcctaggattcaagaaatctgacagcataggaaccccctgaggcagcttccaagtgtcgtcacacctgcccacccgggacggtctcagcgttctggagacagaatcctagtgccccacttgccttggctctgctgtgtgtgttcccgggtccccagcctctcctcagcctcacttgctatttaactagaaatagcattctctacgcatgctttctttgaataatatgtgaggccagacttcgttccctgtttctgtgatttttaacctctgcttttggcagtgtgagaggaggcatggcaacagtgaggaaatgatttccctggccccagtcctttcttaattggtttgcttactgagatgaccaaccctccacatctctagccagtgctgtagaggccgagaagaggaattgtgcctagggagaaacagttttactggggcagaaggcacccatcttctctcttgagttatgatgtattcaaactattctatataaataactgccaggacacagttttgttagtgcagctgactttcagttagtccctctggaatgaaaagctgtctgaagtcaaggaaggcctggcaggtgttccctcaccccgctttctgttccatacatgtttcttgagcgttgatatggcctaggcctggctctgggcactccgtcatatatgatcccataagagatggtgttttgctctaagaacatgggtgtggtaggaagctagcccttgggaggggtcagggtacatctcagtcctctgtcactgtggggaggacctcagtgtcagtaaagttcagggttagtctggctggaaaaaaggtggcagcattgatattcccttccctgtatataaaaccttgagaggagtcctgcataaaatccggtggcagaacccaggctctgcctctcagggcagcacctacctgtcatagtaatttagctgaagttcacatttattttctttttcttattttttactttttttcagaaatggggttaccctgtcacccaggctgcagtgcagtggtgcaatcacagctcactgcagccttgaactcctgggttcaagcgatcctcccgcctcagcctcccaagtagctgggactacagaagtatgccaccatgcctggcttggtttttttgttttgttttgttttgtttttgtttttgttttgtgtgtgtgtgtgtgtgtgtttgagatggggtcttgctgtgttgcccaggctggtctctaactcctgacctcaagcgatcctcccttctcagcctccctagtctctgggattgcaggcatgagctcctaagcccagcttcacatttattttcaaaagctctttgctggagggtctgcagagccccaccttggggtatcattgcctgcacttaggagactgtaatgtaaatggtgccttctttatttgccttccaggggcacttccttgatggacacataatcaggtcaactttgacctcttgtccctggttgagtggggaaatcccagagagaggatcacgtggttgtaggaagacaaacttccagataactctttaatagctttaagcttaattcacttaccatcttttttgtgggggtggatggcagatcttgttcattaaatgagtatttattgactttatattaattaagcacctactatatgctaggcactgttttgaactcagatagcccccatgtgtctgggcgtgggggagatagatataatcacatgaatgcataattcttcagacaaggaatgttattggattttaaaattattggggaataaaataacacacaggacccagtgttggtgaggatatggagcaattagaatcctcacattgccgaagggagtgtaaaagggcagagtcactttggaaaactctttggcagtttattaaaaagttaaatagatccttttatagttcataagtgtgatgatggggtgtacagggaaaaactccaaccccatttttcctctagcctcacaccaccacaacaatcaccaacacagaagacttatgtgaccaaatgtgtggggtgctttccccacacaccaggcaccagacaccagctgggtgtcctccggttcaattccaaaaccgtctacctagagatagtgtcagatcctgcaggttgggggctcagcacccaagactgccctccacatccccagacaccagttgcaagtgcaggcctctggaacttctgactgaccggcttcaagctggggttcccatgaccccctctttgggttcagttaatttctggagcagttcacagaacttagggaaacacttgcttatatttactggtttattataaagaatattacatgggatacagatgaagagatgtgggtagggcgaggtacaggggaaggtcgtgcagcttccatgccctccctgggcaccaggaacctccagtgttcagttatctggaagctctctgaaccctgtcctcttgggttttatggaagttttatgacatcagcattccttcccccagggtatagggtgggaccctcgcaggggagggtcttaagactcacagttggaaggtgggggaagattagagtcctgccttgtggcaggtgaaaggaggacaggagagagattgtgtttcccgatacctgcccttggggcctaacacacccaacattataacaaaaaactataacaagggctgtgggagttaggaaacaagaactgtagacaaaaacctatgtatcatatcacattgggttttcatgctcatgtgtgagaagtgcctctttcaaaccttgttctgacacattatcttacatgcaaggaaaaaaagctaaacatacacttaccatcccacttctaggtatttgcccaagaaaaatgaaaacatacgttcacactaagacttgtactcagctgtttctagcagctttgttcatgacagccccaaactaggagccacccagatgtccaccaccaggtgaatagaccagtaggtccatccatctgatggaatacttctcattcattaaagggaataagtacgctgtgtgtaacaacagtgggatctcaaaattatgcttctgagagtgatggaagccagacacacaagaccatgaaccgcggttccctttctagaaagttctggaaaatgcacactaacctactaatgtgaagccaaccagtggtagcctggaagctgggatggcaagaagaatcgattgcaaagagacaatagaaaacttttgtgggtggtggaagtattccatattttaattgtgatcatttcactcatgtattacatatttcaaaattatcgggccaggcgcggtggctcacgcctgtaatcccaaaactttgggaggccgaggcaggtggatcacaaggtcaggagatcaagaccatcctggctaacacagtgaaaccccgtccttactaaaaatacaaaaaattagccaggagtggtggcgggcgcttgtagtcccagctactcgggaggctgaggtagaagaatggcgtgaacccgggaggcggagcttgtagccagccaagatcgtgccactgcactccagcctgggcaacagagcaagactgcgtctcaaaaaaaaaaaaaaaattatcagatggtatactttaaatggatacagtttactgtatataaattatacctcaataaagttgatttttaaaaacaaaacaaaaaagaagtcattggggaacagttttgaagaaacttgctgtttatataatttcaaaatatcatctagcgcattaactactagttacaaagggggaccacacctttataatttaaagatctgggtattaccaccttaccaaagtagttacactcagcatctctactggatgaacccgacattgtgttgtgcctcctggccaaaaatatttcacctgaattttatcagggagaagcaatcagacaaacccagaatatgatacatttataaaacaagtggcctgaactcaacaaaaaaggggtctcatgtgacttctccatttgtaccgtgaactcgttttccactagcctagtcagatgtgaaacccatgaaacttggagtcacagctgacaccccacctttgccaggcaggagtagctggccaaccataggcaagacacctaaactttctaagcctcatttttctgttccttcaaattgggaattaaaataacaactctttcaaagggagtttttgacaattaaatcctgtttgtaatgttcttggagtagtgcctggcacatagtgatcattcggtcaatgttagccattattttggtagctcctgtcactgacctgctgtggtgtggaaatcccaatgggacgtttccccaaaacagtaatggatgagactgggcagtgtctgtaggcagtttttaaaacttctccttgaaatataacacacactaagaaaagcacacccatctgggcactggttgcataggtcaggaaaacagaagacggccacccccaaaggcccctcgtcatttcatccctcaacaaaggataaccagtatcctggcatccaatggtatggaatacttttgcctgcttttgtattttaaaaatggaatcataccaaatgcacatttttgtacctggcttctttcacttaacattatgagattcagctacatgattaaatccgtaaattcatccatggttgtgtatgattgtaaatggttcgttctcattgctatgtagactttcatcatgtgaatattccacaatttctttctttcttccactcttcctggacatttgggtactttccagtttggggcagttatgaatagtgctgctgtgaacattcctgtacatgaattttggtgtacatatgtgtgcacttacattggtgtgtatacctagaagggaggcagttttgaataattcagtttagcatgttggacacaatgatttaaatgatgtctccaagcacgtatcagtccctgaaggggtaataatctctgaggctgatggcagaggcagtcaggggatctctctgtgttactgagcttgtggtggtgtgtttttgtatcttcggggctgaaggagtgattctggcagggtgagtgtgggttccccaaagctatcaccacattcttgccccagctggatcgttgccatctactgaggcctggctggccctccattacctcgctgtggctctctctgtggttttgcattgagtctgtggtttgcacacatcttgatgaccccatggtttttacctgccgggccatcataggacagtgctctctgatgaaatgctggccatttgtggcacagagaagtaggtgtcaacaagaacacctagcagtgagacaagtcttcaccaagactccaaaatgaaaggttcagccttgtgggcagtttgtgaggagaggaaagagagcaagtcaagaaatgaggctcttaccccagtccctttacagggcgaatgtggagcccggcagctgtggaccagtttgtctccatcatttgcaggtcagaggttaccctcagctcctcagctgcaaatggaagccctctatcaaacggcctttgccagaatacttaggctgtgaccttccccctatgcagctcatttgcctgggtaaatgagtagagtgctttctgcgtggcagatttaaatttcaccactaattgatgctagcgtcttcaggggaaaatgcttgccattagatcacaggcctttgggagacagcctcataacaaatacatccaggacagggggcggggatggggaaagtacagaatgcagctgtaccgaaaggaactgtgggacgtgcccagagaaaccaactgagtacttttgaggcatgcccttggggactgcgcatgtgcatggttgtgccatgtgtgttttgatggcctttttttttcttgctagtgtatagtatgtacaggacaaacttggagccaaactgtctggaatcaaatcccagctctgctgcttacaagcaaatatttaacttctccattgttagtttccttgaccataaaatggggataatgatggtactttgagtcatgagatgattcagtatgttagagacctcataacagtacctggcaggttgtaagtagtcaatttgctactgttgttggtgttattattgaaatgatctaagatgcatcttccactctaggcaggcccctgtgctggccatccccttcatttgccaagtcccccatgcagaggctcctggtcttcaagacccagtatgggtgtctccccagggagagtagcccacgtgacttgttctcccttctgcattcctcatgtcatagcagggcgggtcagagcatggactttggaattggtacaattggtttaaaatcccaactgaagggggatgggggattaagagaggatgcttaaatggatataaaaatgcagttagaaggaataagttctagtgtttgatagcccagtaggatgactatagttaacagtaatttattgtatatttcaaaataactgcaagatgtgaaatgttgccaacacaaagaaacgatatatatttgaggtgatggatatcctaatcatcctgatttgatcattacacattgtatccttgtatcaaaatatcacatgtatcctgtaaataggtataattatgtatccatttttaaaatacattatttttagaatagaatattaaaactatgaatactcaaagttctgaatgagtgtgtcatttattacattaattgtgctgttcaatttaaatttatgatcctccaaataaattgtcaaaatgatttgaaagcaggaactattatttatcttatgaaaagtaagccccataactaaaaaagttcctgcaaaataatctgtaattgtgtttatattacatgaatgattcgctgtttctccaaaagagcatttaagaagtcagtaattctcaaatgtgcaaagtatttccacgtgcttaacaagaaaactatctaaaacgaaacaaacaaaaatcccagctctgccacttggctaaactctttcacattgctgagcctctgttcttcctctgcaaaatgcagctaataataatgcccaccttattaggactatgaggattgtttttgttttgttgtgttgtgttttgttttgtttgagacagggtctccctctgttgcccaggttggagtgcagtggtgcgatctcagctcgcagcgtgcagcctcgacctcctgggtctcaggtgatcctcctaattcagcctccagagtagctgggaccacaggtgtgtgccaccacgcccagcagtttttgtattttttgtagagatggggattcgccgtgttgcccaggctggtcttgaactcatggccttgagtgatctgcccaccttgagtgatcccagagtgctgggattacaggcatgagccaccatgcctggccctacatcactctttaagtggtcctttgtgcatttatttctctgcctggctccagagagctggaggactgtgaagacactccttttttcgcatattcagcaagtatatattgagcatcttatactatgtgccatgcactgtttaagatgctggtgatacagcattggaccagacagacaaaatcctcaccctcgtgtggcatacattataacccggggggagacagataataagaagtaaaatgtaaagaaccttagtgattagtgtttgggaaggaaaaaaatgaagcaggaaaggtggggtatgaaatgtccggggtgaacattaacattttagataaggagggctggggaagagtggcttttgagaaggtcctgaaggaaatgggggagagaaccatgccatttcctggggaagaacctttcagacagagagaacagcaagtgcaaacgtccagaggccaggacattcctgggaaagagcttggtttttactctgagtgaggtaagaagccattgaggggtttggagtggagggacaggacttggcctttgcttaataaaataactggctgctctgtagagaacagtcctcgcccttgaggacttgtgtgttcttgttctagctgcctttctgcaaatctttctccattctgctattcctttctctggatgtatacccagtcccccatattgccggcatgggttcaaccaaacccctccttcatacttgaaagggtagagtagcacactccagtgtgggggcagcccaggttggagcccagctggaagaattcagcacagtaagcagacgggtcacttcccgtccaaccctgtctttccaagcccatcttccttcacactggactccttagcaccttcacacggtgtcgtgcctctgcgtcgttgttaaacactgttcctgctgcctaatatgttgtttcctctcccatctaacacattcccatcctttccgaagccttcacactctagacatgcctcgattatagtagctgtccccttgtgttagggatactgtttctgtctgtcactccttagaagaagagacaggagggagcttgctctcctccctctgccatgtgaggacacgagaaggcagctgtctgtatgtaagccagcaggagggccctgccagaaaccaaataggctggcccctcgatcttggacttcccagccctcagaaccatgagaaaaagagagctattgttgaagccacccagtctgtggtattttgttatggcaacccaagcagctaagacagatggcaaggtgaccaactcaggcatcagaacacctgagagccttaaggcaggggccccttctttcctgattcatgtgtccccatgggacctggctctccagagtcctccatcagggatctttgtgtccacatgaccagaacacagcaattgggtcagcagaaatgggaattgaggcaactgaaagtcagaagggctgagacaggtggacgaagacgtggacaaatgccacttgagagccgtggtctgaagagatgagctcacgcctttgtgtagtgcccggctcccaggtggtttactgtttgaaatgtaagctgactgggtatcagacaactgaatcccactttttcaaacaaagatggtgcaaggccttgtgatttcaccccagtttgcgttctttcactcttggctggcatcctttggctatttaaattcgtagcctcccaacagtttttaaaaaacaaacaaactcacacaatttatcttttcatgtaagctgcaatttggttgaaacaagacctttctagtacatagtccaaagctcctgataactgaaactacaatcagtgtttctgttctgtgatctgttttttgttttaaaagccacaacagaaaaccttttcttctgttacggctgtcaggagccgtttgggcttaatcaataatgaggtgtttcacttcctggggctgggctatctgtggagagcacttacttctccgtaacccatgaagccagtgaaggaccctgaatctgggtaaattcaaaattcttctgagccttggatagtcttaggcatagttctggcagggtctgacttgaaaaagtaggttgtgtatttattattgtcgtttcaatatcactaacacgaggtgaagaagaagaagaaggcaaaagacccagcctgagcagaactcaatgtaacagtccttgattctaagccgcccccgtccatgtgatacaactcctagcgggggagggatagtggggcattatattaagtataggtattaatgataagttcgtctagtttggaaaacttttaaatgggcagagatgaacataatcagatggcaaggatgtggtagtagctgtttgaataacaataatgatgaggatagctaacattgataagcattatttcatgtcaccctctccgtgacagacagagcctgagaggagtcgccattgcccccacacagccagcctttcagcagccttcttggcagcagctatgtcagaccaacagtaccttcctaattttagcctcacaaaattcatttatgtttcatatataccttattcacatagcatgaaggtaatttcatacgatgttttttgttttgttttgtgacagggtttctttccatcacccgggctggagtgcagtatttcatacttcctgtatttgtggcaggaagctttatgctttatcatcagagtgatctttgaagggaaggacttactcagcatttaaataacacaagctagattacagagcaaccctttaaaccatttaagaaaaaaatgatttcctttttaaaaaatggtaattgctgtatgattgtcaaatttttcctcttgaaagtattttttaagtaaaaatgagcctgcatactacacccatgtatgaccatcatataacaagacagggtaaatgcaggtcacgcatccctaatctgaaatccaaaatgccccaaatctgaacatttttcagcaccaacatgattccccacctgaccccatgtggtcacagtcaaaactttgtttcatgcacgaggccagggcacagtggctcatgcctgtaatctcaacacttagagagaccagtgcgggcagatcacttgagcccaggagtttgagaccagcatgggcaagatggagaaacgccatctctactaaaaatacaaaaattagccacgtgtggtggcgtgcacctgtagtcccagctacttgggaggctaaggtgagagaatcacttgagcctgggaggcagaggccacagtaagctgagattgcaccattgcactgcaacctgggtgatagagcaagaccctgtctcaaaaaaaaaatttatgaaattaccttctatgctgtgtgtataaggtatatgtgaaacataataaattttgtgtttaggtttgggtcccatccccaagatatctttttttttttttttttggagagggagtctcactctgtcacccaggctggagtgcaatggcacggtctcagctcattgcaacctccgcctcccatgttcaagcaattctcctgcctcggcctcccaaagtgctgggattacaggcgtgagcaaccacacccaaccgcatcctcaagatacctcattacttatatgcaaatattccaaattctgaaacacttctggtcccaactattttggttgagggctgctcagactgtaatacatcagtgtgattaagagcagccacatggagtcagtctctttggatgccaggcctagctctgctacccagtagctgtgtgatctggggcaagtgacttaccctgtctaagcctcagtttcctcatctgttaaacaggcatgatgatgataagcagtattttatgtatgcatatatcttcctacgtttaaccagtggtttctaaacatttgaggcatatgtatagctctcatcttactaattacaaattatcattagctgttcttaaagcagactttttttttttttttttttttgagacggagtctcgctctgtcgcccagggtggagcacagtggtgccatctctcggctcactgcaacctccgcctcccgggttcacaccattctcctgtctcagcctcctgagtagctgggactacaggcacacaccaccacgcccaactaattttttgtatttttaatagagacggggtttcaccatgttagccagaatggtctcaaactcctgacctcgtgatccacccgcctcggcctcccaaagtgctgggattacaggcgtgagccactgcgcccggccaaagcagactttctaacactgctattcaaatggtaccatccttcatcatttttaaaaagtgtgatttaaactgttaagtagggctgggcacagtgaccatcccagtgcttctggaggccgaggcaggaggatcactagagcccaggagtttgagaccagcctgagcaatatagggaaaccctgcctgtacaaaaaataaaaaatttgccaggcatggtagtatgtgcctgcagtcccagctacttgggaggctaaggtaggaagatcacttgagcctgggagctcaaggcttcagtgagctgcgatcacgctactgcattccagaccggcaatagagttaaaccctatctcaaaaataaataaataactaaactgttaaatgtgtggcttagatgatttattcctctaaataggatgaataaatttgtgagattgggcacagtaactattttggtacagtggcaaggtgattggtgctggcatcagaacacacctgactgttagttcaggatctgtgcttctcgcattcgtgcaatgaggatgtttaatgagcctctccagcaggccagaagataatgcatagggcatggtctctgctattaggagttaggaaatgagaatgggggaataggtatagaaggagggagatttcttatgttcaaaatactgtgagaacactgaggagggagctggagtgcagtggtgcgatcatagctcactgcagcctgaaacacctgggtttaagcgatcctcctgcctcagcctcttgagtagctgggactacaggcccaagccatcatgcctggccaccatcttaatcatttttaagtgcatggtttaaggccaggcacggtggcccaagcctgtaatcccagcactttgggaggccgaggcgggcggatcacgaggtcaggagatcgagaccatcctggcttacacggtgaaaccccgtctctactaaaaatacaaaacaattagccgggcatggtggcgggcgcctgtagtcccagctactccggaggctgaggcaggagaatggcgtcaacccaggaggcggagcttggcagtgagccgagatcgcaccactgcactccagcctgggcgacagagcaagactccgtctcaaaaaaaaaaaaaaaaagtgtatggtttagtgtgtgccagatcctttttaaattatttctctttgaagattccttcctagtctaacaaatttgtagaaaactactatgggaggagggcctagcttagcaggagttttccttaaatattttatgtgtggatgacactgcgaggctttttcctcagacatctggaactggccatcggagagctgctccaggcagttgctctctgttgctctacctcgttgattgaccgcttcctgcacattggacctgtatgtatgatcctgcacaccagatgggatctgaggaaggctcagtcaggagtccctgaaccagttcccactgtttgaaacaatggttttgcaccctggtagtgaagcatttgcttttgagaactgcaattgcatgccttctctgacatctgtaacaacaggcattctctttcatcactttcccacgccctcatttgacctttacagcatttggccgtttttactcatatattggggattgaggtcacagatgtctccagttttgtcaaataggtgatatttctgtttctcattctcctggttgcttttgtgtgattctccagaggaaaaagggtaaaatctttattctgctgtttttaaacgaagtacagttaagtaaaataaatttagcattctggaaaatctccttttttaaaaaaaaatttatttatttatttgagacaaggttttacttcactgcccagactagagtgcagtggcacaatctcacagctcactgcaaccttgacttcctgggctcgggtgattctcccaggtaggggctacaggcatgcaccaccacacctggctacttttttgtattttttgtaggatggggttttgccatgttgccaggctggtctcaaactcctgtgctcaagtgattcggcctcccaaagtgctgggattacaggtgtgagccaccacacctagccaaaaatctcctttttttatttatttttattttattttattatttttatttttatttttttgagacaagagtttcactcttgtcacccaggctggagtgcaatgacaggatctctgctcacttgcaaccttggcctcctgggttcaagcaattctcctccttcagcctcccaagtagctgggattacaggcacccgctactacgcccagctgatttttgtatttttagtaaagacagggtttcaccatgttggccaggctggtctcaaactcctgacctcgggtgatccacccgcctcagcctcccaaagtgctgggattacaggcgtgagccactgcacccacccaaaaacctccttttttaaatggtctttatattttgtctactgatgatgacttcctcactaccattgttttagaaactgctccttttgtgccatttaaaggtaactcgaagccaggtgcgagtgtggtggctccagcctgtaatcccagcatgctgggaggcagaggggctagaggatcgcttgagcctaggagttcgagaccagcctgggcaacatagcaagaccttgcctctacaaaaaaaattttttttttttttttagttagccatgcattgtggcacatgtctatagtcccagctactcaggaggctaaggtgggaggattgcttgatcccaggaattcaaggttagagtgagctatgattgcaccactgtactccagcctgggcaacagagcaagacctgtctcacaaaaaaaaaaaaaaaaagaaagaaagaaaaaagtaacccgatcttgttgaggaatgtgtgcttatgcccttttccgccttctctccattagccctggctgtttctgtctgcctgtaattttattagcatttcagtcagatctgtcattaggtacccatcttcttgggtatacgtatcactctgctaagaaacaaaaggaatacatgtctcctccatgactaggcagtgggtgccacaggagccaatgtagaccaatatagtcattcaggcaggaagcttatgtatgagacggtaggtgatagacccctagattcctgtggcttcctcaggtcttttgtatatgaagaatttcataggttttcattctttggtctacatgcagagaagagagtttcttattagagaacagattggagaaaaaaatagggcttttactgtttattccacgtatttctgtattgtgtgaaaagtaatttagcaatgaacacgtattttgttaaaaaaaattgtagaatcgttagaagtaaaaagtaaagtcattttctcattctcaaagttacctgctattaagagtttaaattgtaccttccagagctttctgtatatgtgtctacacataatagatataatgtgctgggctgctttttatacagatggagccatgctgaatgtgctgttctatgctttgctttttcccacctaaaaatgtattgcatacattttcctataatgatgggcataaatcagcctttgaaaaacttgactggagagtatttctttggcttttttttttttttttcagagacgaagtctcactcctgtcccctaggctggagtgcagtggcgcaatctcggctcactgcaacctccacctcccgagttcaagcgattctcctgccccagcctcctgagtagctgggattaccggcgcctgccaccacgcccagctaatttttgtatttttagtagagatggggtttcaccatgttggccaggctggtctcgaactcctgacctcaggtgatccgcccgcctcagcctcccaaagtgctgggattacaggcatgagctgccgcgcccagccaactgtataataatttgtttaatcagtctcctgttaaaagacatcatctcagtcttttgttaatatagataatactgcattggctatctatacatgtgtagacacatgtatacacacacatacatgtgcatgcaaatacatctataggatagatacctcagaatggaataggcagatggaaggataggtacattttatattttaaacaatattgccaaaatgctctccagtatagcacctccatcagctgtatattagggtagtggtaaaatggtaatatgttagaattgcagctgccttacagtcatccagtccacctctccacaacatgggtgaatctcatggacgcgttgaataaaagaagccagaaataaaagaatgtatactgtatattttatttctataaagtagaaaaccagaaaacctacccatgctattagaaatcaggatagtggccaggtgcggtggctcatgcctgtaatcccagaactttaggaggccgaggcaggtggatcacctgaggtcaggagttcaagaccagcctggctaatatggtgaaaccccatctctactaaaaatacaaaaattagccgggcgtggtggcgcacacctgtagtcccaactactcgggaggctgaggcaggagaattgcttgaatcggggaggcagaagttgcagtgagccgagattgcgccactgccctccagcctgtgtgacagagtgagatcctgcctcaaaaaagagagagagaaagaaagaaaaagagagaaagagaaagagagaaaggaaggaaggaagggaagggaaggaaaggattgggatagtggatatccttggggagggagtagaggctggtagagggcacaaaaggcttctggaatgctgggatgttttgtgtcttgatctgtgggtgctgtttacacaagtgtggtcattgtgtgaaaatccatcaccgtacacttctctgtaaacttctgaatgtgtattatctttcaataagagtttgttttttaaaaaagcctctagtcccaactcttccattttaaagataagaacccaggagttgaagagattccccactgtcttgccatatgagcagctcagggtttctgagagcctgtgcaagaagccagagccctggcctgccttgccaagactggctagtgatgttgttggcacttggaaaggccgtgaatgtgtgacaatgtctctcaccttgaggcccctgaagaataatggagagtctcagagccagctcatgtgtcaaatggaatttctggttttatagcttatgctcttgtgtttagggcagaaattctagcacaaggcctcacacccaggcagtagacaagggtggggaagtttctgatggagaaaagttcggttctctgttactctggccaacctctcattcttttgtttttgtttttgaaatggagtctcgctttgtcgcccaggctggagtgcagtggtgcgatcttggctcattgcaacctccacctcccaggttccagtgattctcctgcctcctgcctcagcctcccacgtagatgggattacaggcatgcaccaccacacccagctaatttttgtatttttagtagagatgaggttttaccatgttggccaggctggtctcgaactcctgacctcaggtgatccgcccgcacttggccaaagtgctgggatcgcaggcatgagccactgcgcccggcctcaacctctcattcttagtcctttttctcactgcatcctcatccttcccgttttgctgctgcttcctactccttttcaggctagcctatttcagaaaattttatcttttttagtaaaattatttgctcagaataaaaataaagcagatttctgtttcattcttcctgggcctgctttgggagggtggtgagtggtgaactccaaggaattgtttgcatggtgtgctaccctgatgggagattctcagcgtccaggattcctttacttttctgtgggggttctatctggaaaccttatgtgactcagggcatagtatgattttgagcacttcctgtggtcaaaaactgttgtctttgattggaaattatgctgtgttctgagtgcttgctggcacgcacacactgttgactgcttgttctggtagcacatctgcgtggggtgccttaaaagtgggcactctctcagcagaaaattcccatgtgggacctcagttcaagcccctcctcactttcatcactttcttctcttttgcttcccttcctctgtgccttcactcctccacactggcctcagcaaatcccatctattttccaagccccatctgaaagcgtgcctcttctctgatgaccatccttgttggagctgactttgccgtccctcctgtggacatccatgccagttgtctgtgtcatctgtttagcagtcatctggtcctaacttttagcttatcttttattatatctaagtgtgatctaacttttcacctttatcttgtctccctgtcacctcgaaagaggacacgacagtgctgttaatttttctatctcccatgggacttaatcggtgtcctccacgtagtatgctttaataatggtttattgctgtgatactgcttcacaaatgccagcagatgccatgctgtatcatcagagatgagattattttatttatttatttttaatttttttattttttgagatggaatcttgctctgtcacccaggctggagtgcagtggcgcaatctcggctcactgcaatgtccgcctcccaggttcaagcaattctcctgcctcagcctcccgagtagctgggattacaggtgagtgctactacccccagctaatttttatatttttagtagagacggggtttcaccatgttggccaagctggtcttgaactcctgacctcaggtgatccacccgcctcagcctcctgaagtgctgggattacaggcatgagccaccggactcattattatatgagtcattattatatgcccagacaagattattataaatttaaatttaaatttgtaatttattttgtgaacctgagcaggtgacttttttttttcttttcttttctttttgagacaggatcttgctctatcacccaggctggagcgctgcagtggcgtgatcatggctcactgcagccttgactgcttgggctcaagtgatcctcccgagtagctgggaccacaggcatgcaccaccaagcttggcaactttttaaaatatgtttcgtagagatggggtctcaccatgttgcccaagctggtcttgaactcctgagctcaagtgatcctcccacatcagcctcctaaagtggtgggattacaggtgtgagccagcatgcgcagccagtggcatcattctttaagtctacttttactccataagccaatctcccattgaaaaactgacaaaaataattctcaactttcaactggtttcagctgaccctctgaatgtgggataatatttgcttgatagggcagtttcagttcagcagaagggctggtgtggctcattggagcttatggaagggggttctaccagggtaataaggtcaatatgtgaatcctttgataaaaaagaaatgggcacaagccaacatggacccagagagagaataaaagtcttaaaaacttgcagaaatgaacagtcctggtaggtctttggtagcctgtccaaatacagagcatggatctaaagtgatttctttcccttcatatgtttattcagttatcatagtactaccttttgatagccttcccctatattttgtgacaattactttatcaaatattcagttcttaaaattgagtctttttaggccaggcgcggtggctcacgcctgtaatcccagcgctttgggaggccgaggcgggcggatcacctgaggtcaggagtttgagaccagcctggccaacatggtgaaaccccgtctctactaaaaatacaaaaattagccgggcgtggtgacaggtgcctgtaatcccagctactcaggaggctgaagcaggagaatcgctggaacccaggaggcagaggttgcagtgagccgagattgcgccattgcactccagcctggaggacaagagcgagacttcatctcaaaaaaaaagagtcttttctaagatttcttttgttttactgattttactttcttgtttttataccaaaatcatgtttcctaaatttttactctcaaaagtgctttaatagctggtaaaattcaactttttctctgggtctttttcttgggttttttgtttgtttgtttgtttgtttgtttgtttgttttgagacagggtctcactttgtcacctaggctggtgtgccgtggcacagtcatggctcattgcagcctcgatctcccaggctcaagtaatcctcccacctcagcctcccaagtagctggaacttcaggtgcacaccaccatgctcagctaattcttgtattttttgtagagatggggtttcgccatgttgcccaggctgatctccaactcctgcgctcaagtgactctcctgcctcagcctcccaaagtgctgggattacaggcgtgaactgctgcactcggcctggattaatctttttcaactccatgtttcattcccataattgctgtctttgccagaatattctttagcctcacaatgtttagtttttacaatcctaaaagaataattgaacacctgttatgtgtcagttccattagatgctggaggctaaaatatgaataagatagttcatattgccccctagaaggactcttagtcttctctggtcaaaaccaagtcaataaaggaagtattagttggaaaccctcagtctccccagcctcaatacctagcttcacttgtacatccagcagcccctggggtctactttgcaaccttccagtttgccatatgtgatattttctattggatcttttaaagatatttttggtatttttttctttctttgcaaaatatttatacgatttttggtattattttatttagtgcattttaaccattccattgagatttttattttatttatatacaaaatgcaattgaggccaggcgcagtggctcatgcctgtaatcccaacactttgggaagctgaagcaggaggattgcttgaacccaggaattcaagaccagccccagcaacatatcgagactctgtctctacaaaaaattagaaaattaatcaggtgtgctggtgcatacctgtagtcctggctgattgggagactgaggcaggagaatcacttgagcgtgggaggttgaagccatggtgagccatggttgcaccactgtactccagcctgagtaacaaagcaagaccctgtcccccacccccaaaaaatgcaattgaacatctttgtaatgtatggtccttcatttcaaagtcatgacacctctctgctttttttcctcttctcttttttcttgtgtagtcattacagttgtttgtcttactttctagggttgatgggatggagtgagtgtaataagttagtctataataatatttctggcctatcaagtacaaggcatttttgaagccaagaagatcctgaggaagcctgaggccagcccccattggagatgactacacacatcaaagagaaaattaatatctctccacagtcagtttgcccagtgcccatgaggctgcaggggttagtgctgcagaagtcagggagcttgcttgcttggagtctgggatggaggcttgtccttaaagatacactggattctctaacaggatgggaggaatagtctaggtgtggaaagtcaactgaatgagagtcaggtgtagaggtgagaggccgtgctgaccacgtagccatattgccctaaaatcctttgaacgtcagcctccagcaattggacttggcctgggcttttcagattttttttttttttctcagatccctagaattgtaagggagtccttctgcatggggacgggaaaggtcaggccaccaggactctggatccttcagccttaaggttcagtttaagatttcatttggaagaaggattttctcactcctgagaaagcttgtcagccctcaccgttaccatttgcgggaaggtagggtttgaaggttttcatcccagagaatctgctgacctgagtcaacagcatgtcctccatggggagggggtctctcccttgttaccttcccacaccagtcaacctcatcagtcagtcccattgtttttaccacctaagcgtgttttcagcctggcccctgcccctgcgtttagtctctcaccctcttcttggtttactgtggtagcctctttgtaattgaccttcctgtttctggtctcatgtcctttcagtcccttatgcacactgctgcaaatatctttccaaaataaatgggatcacttcatcttcacctgcttaaaactcatcagtggttctgtatcactctaggatgaagtttcatcctactacttaccagcaggatgtggtccctgcccactgtctagctctgcctcttgccatttccttcattcactctaaacttcagcccacagattaaaactacgcacagttccttaagctgccattatatttctcacccgcactgcctttccttgctgttccacttcgagactccctcccagagtccttctctgatctgctctgtgagccagggctccctgccgtgtctgtcacgcccggagtccttctctgacctgctctgtgagccagggctccctgccatgtctgtcacgccctgtgctttcccagtgaacacgtagcacactgtactctgattgtcttccttcctcaatggatcctaagttccttgagggaagggaccgggtcatcttcattgtctcctccaagccaagcatacagggctctagtaaatgatgatgaatgactgaatggcacagaaacactccagagacctctcccctcaaaagcttcattcagtggtggaaacgtggaattgtatacatagaaagggaggaggaagaagattcatataacactaaggtcttgagcaaggtggcagtatctgggcaggagcaaatgcccagtgtttagtgtaggggcacagcatgtgtgttgctgatagggcatgcgtgtgaaacatttaggtgggatatctaaataaatgggcttggacagaaggagctgtgggtcagcagagcaggagggaagaaagcaagggaatccaccggcaaggctaatgggaagcctgctgtccctcggctggaggccagccacaaagtgtcacacacatccttcctgagtttggggaaatatctgtaggtcacttcagaatttgggttcaaaataatatggaggccacattattcataatagccccaaaatggtaagaacccaaatatcccactgatgagtgaatggataacgagatataatatattcatacagtagaatattattcggccgtaaaaaggaacaaagtagtgacgtgctacagatggatgaaccttgaaaacattacgctaagtgaggtaaactagtcacacaagatcacatggcccatgatctcatttacacagaattatctagaataggctaatctataaagatagaaagtagattagtgggccgggtgcagtggctcacacctgtaatcccagcactttgggaggccaaggcaggcagatcatctcaggtcgggagttcaagaccatcctggccaacatgatgaaaccctgtctctactaaaaatacaaaaattagccgggcgtagtggtgtgtgcctgtaatcccagctattcaggagactgaggcggaagaatctcttgaacctggaaggcagaggttgcagtgagccaaggttgcaccactgcactccagcctgggccagagagcaggactgtctcaaaaaaaaaatagaaagaagtagatgagtggttgccaggggctgcgagaagggagaaatttggagtggctgctcatggatacagttttttgggtgttgatgacagtgctctaaaattgtggtgatacttgtgcaactctgaatgtgctcacagccatcgaattggacactctcacagtgggtgaattgtatgttgtgtgaattatatctcaataaaacggttgtgaaataataatcataataaacggaggataggtggatagatgttttactccaggtttgctacttaaaatttttcactgagtctgcagtggcctgtgttctttttgaggtgggtccttggagaagagacctgctctgacaaagcttcctcactgcctggtggtttctcctgtctggcacatacactctgtcggactgcttgaggcactgctccactctcaggagcaaccagggatgggagacagcactagtgtcttcggtgaacgtctgcatccagcccgcgtgagctgcgacacacagacccttagagagcacttgcctcctgcagaggtctaggggcagagggttggaccagtcctgccctcaataaccactcagcgacttgttttctgtggggtgtcatcagctcagagaagcaacacgtctttcctaggttctctgaaggagatctactcatgccattgttggatctgtctgctacaagtgttactgggctggattcgaggactttgtttttccatctgccctctgtattttcctaggaatgcttctgtgaatacccccctcccacctgccaaggcaagtgaggcagcagcaccaggagagctggacccctgcacacaccaccactgccaccacgctgcctttgctccgctgcctggcttctctgtttcccctactgaactgtgaggaattggggcaaagactgcctcttctttccattacctgtgacccatagtaggcactcgggtatctattgaaggaattagtgaatttttctttccacggattgaattagattgggacaaagaaagaaagtcatggggtgcagggtgaattcttggggcttgatcacttcaagatctcatcttggcttaagtctgtcaacatttttctttttccttacccagccctaagctatttccattggcaatatattgcacacaagctgtgtttcacttcttaatgctatgggatattgctgctacaagagccatccttggtgtttgcagaaatatttgtgatttgaggaacccagtgcagtgtagagcaggtaatgtgggggagagcaaactcacacccctgcagtctctaacttgaaggactgtgcaagcaggcatgttccttacgtaggggtgcttaacctaaggtctgtggataggctatggaagtctgaactcctcaacattactgcggaaattttgtgtgtgtgcacacacacccaggtgtacacttgccctgtggatggtgcagagtctatacccttcatcaggagatcagagtgaggggcgtctcctcccctgaaaaagttagagatcactgttcattcacagcgtttgtggaaactataccactgatcgagagcaagccaggacgatgatgcagccttgttctcaagggatttataatctagtaagggtgaagatttcaccctaaaccatgtagagcctacaaaaggaggtcagggaggccagggagggctgggaggtagagttgttgggacttaaaggatgactcgaagtggaatgattgagcctagatcaaatcattttctcttcacagctctccgtgacaggagactgcatagcttccctgtgagtccatgggccccaaagtgattataactgacctctagcttgactgtgcccatcccctgccattggatcctctccaaaacagacagtcattgtcacgtatactcacacgacacacagggaaaatagcaaccaacaaactgtttccatgtgttagagtggtagaacctggctccatttccagtgtctcacctccatgtgtatgaactaaaaataggcaaacttggctgggcgcggtgactgacgcctataatgccagcactttgggaggccgaggcaggcagatcacgaggtcaggagttcaagaccagcctggccaatatggtgaaaccccatctctactaaaaatacaaaaattagccgggcgtggtggcgtgcgtctgtagtcccagctactcgggaggtggaggcaggagaatcgcttgaacccgggaggcagaggttgcagtgaactgagctcacgccgctgtactccagcccgggcgacagagccagactccatctcacacacacacaaaaaaaatagacaaacttctggggggtatcagggtgtaatgactcccttggttttttgggttttttttgttttgtttctcttttttggggtttttttttttgagacggagtcttgctctgtcacccaggctggagtgcaatggtgtgatctcggctcactgcaacttccccctcccaggttcaaacgattctcctgcctcagcctcctgagcagctgggattacaggcgcacgccaccacacctggctaatttttgtatttttagtagagacggggtttcaccaagttggtcaggctggtctcaaactcctgaccttgtgatctgcctgccttggcctcccaaagtgctgggattacaggtgtgagccaccgcacctggccggctccctcagttttatccttccctacagagaggtggcctcacatacatccatctcacttatgtttttatgtgattgcagaaataactcccaatgttaagaacactgatgagtggtgcacagttcttcagaaaatatcagcccagtttttcctagaactgctgtccaaaaaaacccaccaagcttgtaaatggaaatggctaataagtgttgtttgtttgtttgttttttgagatggagtctcgctctgtcacccaggctggagtgcagtggcacaatctcagctcactgcaacctccgcctcccgggttcaagcgatcccccacctcagcctcctgagtagctgggcctacaggcgtgcatcagcacgccaggctactttttgtatttttgtagtagagatgaggtttcgccatgttggccaggctggtctcaaaatcctgacctcaggtgatcacccacctcagcctcccaaagtgctgggattacaggcgtgagccaccgctcccggccagctaagtgtttagaataagtaatatgcatatattttcagctttataactaactgagaacaaattgcagtgttgtcctgatgggacacagcaggacaaaaggccaactatttcttgagctgatttcctacagctgctggtgaactaactcccagattgcttaatctaactgggaagtgctctttctttagacttaggcgtgcggcgcacagcctttcgtgagaggtacgaaagcagtgtctgcgggcagcatgacagatgtggccctgagcgagttccttcactcctgagtctccctgtccttgattgaaaaatgaagacaaaagtagcttccttgcaaagtacttgcacatattaaaagagataatatgtaccaagtgccaggctggagctcacattgccaggccctgtgctaagtgtttccatgagtctcatttaagcctcatagcaaccatattagatagctgtgatttccaattttctcttaagaaaaatgggattcagaaggatgaagacagaatctgggattcaaacccagagccattgcctgctagccacactgccttcctttactggagtgaattgaagcccacagaagacagatcaggtggagtcctggctactcacagagcaatggaaacaggcagatagtattcaaccctgttcccctgcactgaagatttacttccaaacctctcttaactacctgaggattttttttcttcctgacaaatctgtacattttcttttcttttttaaaaaaattgagacaggtcggctgcagtggctcacgcctgtaatcccaacacttcgggaggccgaggcaggcagatcacctgaggtcaggaattcaagaccagcctggccaacatggtgaaactctgtctcttctaaaaatacaaaaattagctgggcgtggtggtgggcacctgtaattccagctactcaggaggctgaggcaggagaatctgcttgaacctgggaggcggaggttgcagtgagtcgagatcgtgccgctgcactccagcctggatgacagagcgagactccgtctcaaaaataaatacataaataaattaaaatgaaaaattggccgggcgcagtggctcacgcctgtaatccctgtaatcccagcactttgggaggccaaggcgggtggatccgagatcaggagatcgagactatcctggctaacacagtgaaaccccctctctactaaaaataccaaaaacttagccgggtgtggtggcggggcgcctgtagtcccagctactcgggaggctgaggcaggagaatggcgtgaacccaggaggcagagcttgcagtgagcagagatcgcaccactgcaatccagcctgggcaacagagcgagactccatctcaaaaaaaaaattgagggccaggcacaatggcttatgtctgtaatcccagcactttgggaggccgatgcaggtggatcacaaggtcaggagttcgagaccagcctggccaatatggtgaaaccccatctctactaaaccccatctctactaaaaatacaaaaattagccgagcatgatagcggacacctgtattcccagctactcaggaggcaggataatcttttgaacccaggaggcggaggctgcagtgagccaagattgcgccactgcactccagcctgggtgacagagcgagactccatctcaaaaaaaaaaattgagacagaatctcgctctgttgcccaggctagagtgtaatagcacagttacagctcacctcacaacagcctcaacctccaggctcaagcaatcctcccacctcagcttcccaagtagctgggactacaggtgtgcatcaccacacctagctaagtgtatcttttctaacaccacttcttcagttttctgacaccactgggtgtctgtctagcaattcatttaattctgacactaactcccaaagttagcattagactccataagttcaagggctcagtcccacaagactgcccttcagatgccagttgcaagtactgggtgactaaccagaagtaagcttacccacacttctgtcctacttgccttcaaagtctggcgttaccatcccattcctccctgggttccataatttgctaagatgactcacagaattcaagaaaacgcttaacatacatttgctgatttattataaaggatataactcaggaacaaccaaatggaagagatgcaagggacaggatgtatgcaagggcggcgattcaccaggagcttctgtgccctctctggatacacactctcccagcacctcgatgtgtttaccaacccagaagctctacagaccctgtcactgagggtgtttatggcgtttctgtgatgtccgcttgattgattaactcattggccattggtgattgagctcaatctccagcccctctcccctcacccccagaggtcgtgggtggggctgacagttccaaccctctaataaaggtttggtctttctggagaccagcccccatatcctgcactatctaggggcccacaagagtaacctcattatcatgaaactcaggtttggttggaaggggcttgtttgttctgagacggagtctctcactgttgcctgggctgagtgcaatggcacgatctcggctcactgcaacctccgcctcccgggttcacacagttctcctgcctcagcctcctgagtagctaggattacaggcgcatgccaccacacccgggtaattttttgtatttttagtagagacagggtttcactatgttggccagactggtctcgaactcctgacctcgtgatcggcctgcctcggcctcccaaagtgctgagattacaggcatgagccaccatgcctggccagaaggggcttgttaatgagtaacaaaagatacttctatcactcaggaaattccaagactttggggaactctgtgctaggagccggggacaaaaaccaaatatatatttcttctactacactgccccatcccctcctgcaggggtcctaaatttaagaccttgctagtgggcttcctgcacccttctgagggtgcgcaggagaggaggctgccagcctctacatctggaaggagcaccagggagggcccagcctggggctgggagctcaggggccagtgtgccgcggcagcacagtgagaatcctgggcctgtgtggggcttgttcttcactttacaccccatacatggtttattagttaatctcccgtgagccagaggacagtattaatctcaaagtaatgctaatccctttttacaagaggaaacagaaatccccaagtcctctggcagaggccgttcacagcccatcagaatggaaaaggcctacgttccagcccttttcctgtcttctctgctttaggctgatgaagctgtgagttttatagcattggactgagcagattcagaattttaccaaataccttcccacttggaaaacagccaccctgcaaaaaacctccgtgtttccctccacattcatcatagccaccagttcctagagctatcatgaaggagagttggcgggacgagagctgttaaattcagttagttactatttccctgcagtcagcctagatctatgtaattctgtctttcagagaaggcagctaatttcagtatagatactcccatctatcactgtaacagtttaataggtacggttatagcttgaatacaccaacaggctttatgtgagtaattgccgtatttgcactgctttgaattgataaagtgctaaaatatgaggtatactgtttcatatgctgtgatttttatgggggctgtctgttacttaatctctctccctccccctgtaattctagttttactaacaaattgctttcccacagtccaaatagttttaaaacaaagctttctccttttttttttttttttttttgctaccattcctcaccaccctcccgtttttctgcttgcttataagttaagcacaagtcacttgcattccagaaattccccattgccataaaggcaggcagtcagctcgccagctcttgcctgttccagataagcagggttcatttagcttgtgactcggcattgctagcggatttcctcaggccccagtgccctgatcagaacagtgtgccctggcacaccgcctggagagcccagcagccaaggagaagtagagcttgtttcacaaagtaaccctggccttccatccaagacagaaatagtctgggtggcggcccaaggccccgagacggttccagccggctgctttgcctggctgtcccggctgcactcgccttctccatggtggggagctcgggcagacaggttgctctggcctgagcgtgccaaccaggcccatggcctgtcctgccatatttgccaaggcagtacaaacaggacggtacagcaggctgtcctgtgagagtggtcccaaggagcagtacccactctcggctgcaggaccttctcgggcccttggtggagctggcctgactgtgccattgaattatcacctgggggctccggtggcccttgctcttgctctgtgtctgtctgttcatctcactcacacgcacaccttctgtgctgccttgctcatgaggtttcacacccagcaaatccccatgcctctataacccctgtcagtttccttgacctctgcttttttcctgttcatttcaccaaagccagtgaagcacagatgaactaacctcttctcctccgtgttacactcactgtaaaaacatctaagacccgcataaggtcagtctgggaaggctgagccctgataaaaggcgacagagcagcccattagcaagaatgtggccagcttctgcagggggcgtggccctgtggggactcccagccacagccaaaccatggctctgccctgtaaaagttaacagccaggtctggagaccagacttaacagcagcacatgactggctgtggcgaaataatgaacccactacgttcctagtgaagttaccgggaagaaggggagggagaaggcttcttggtgaatgtagaacctcaatacatctggaaaggaaagtaggagttggatgctccagccgcttagggagcagctcctccatgctggccccagtaaggcacaggccccttgagaacaaacacttgagtcgccttcctccctctcttcagctggagaaacgctgcacttttcttcctccttccctcctttctgaagacagctactgaatgccttccctggtactagttactgtgcaagcccaatacacagacgggtgatgagaggactctgcctgctcctgtgaactcaggggtctaccaggggaccagcattaagcagctaatcacacagctatccagcgactttcacatggtgcccagggctgtccaggaagagcatggagacagtgccttgtggtgattgattaaacacagactctggaatcggactgcccgggtgtgaatcccagccctgccatctgtttgccacgtggctcagtttgttcagttataaaatgggaagaagaatggtagaatacaactcacagagctggtgtgaggactgggtgagacagtgcatgtaaaaggcttatggctggccttggcccagagtgccggcactgcgtaaatgtaagcaattgttgggatcctataacaggaacttaatttagtctaggagtcaggggagacctcggagggagcattgtttagtcacagaacagaggtaaaagtggaaggaacaactgtagggaggccctgcaagttcatcaggactgcagtgaagtataaggggagggtggcaggcttgagcctggtgacaggagcccccgaggccacatgttgagaagtttgtgttgtaccctagatttttatcctagattgcagggactgggatcagccttcctgcctgaggcttacaggcttctgactctgaaaagtattctttcttagggaagagaggccaggaaaggaagggacactgggctgtgattggtgacatgtttgcctcctttcatgggtcattgggaatcaggaacctgaaggaagttaacctctgccctccttaatgcttgggaggaatctgcttgtaaccccaaggggcttttctacttgggcctgccgtggaaaggaagcgggtgttttgtgtgtgtgtgtagtggggtctgtgtgtggggggtaggatatgtgtgtgtgtggtggtggcgtgtgtgatgggatgtgtgtgtgtggtgggatgtgtgtgtgtggtgaggtgtgtgtgtggtgggatgtgtgtgtggtggggcgtgtggggggggtgtggtgtggtgtgtgtggtagggctgtgtgtgcggtggggtatgtgtgtgtggtgggtgtgtgtggtggggtttgtgtggtgggatgtgtgtgtggtggggcatgtgtgtggtgggatgtgtgtgtggtggagtctgtgtggtgtgtgtgtgtggtggggcatgtgtgtggtggaatgtgtctggtgtgtgtggtgggatgtgtgtgtgtggtagggggtttgtgtggtgggggatttgtgtggtggggtgtgtgtatggtggggtttggtgggattgtgtgtgtggtgtgggggtgtgtgtggtggggtgtgtgtgtggtggggtttgtgtggtgggctgtgtgtgtgtggtggggtttggtggaaagtgtgtgtgtggtggggcttgtgtggtgggacgtgtgtgtgtgtgtggtggggcaggtgtgggggggtgtggtgtgtggtgggatgtgtgtgtgtggtggggtgtgtgtggtgggatgtgtgtgtgtttgtaggggggtgtgtatgtggtggatgtagtacacctgtattgtgctcgcggtctgtttctttgttggtggatctttagcctgtaagatccctcacagtggtggcaccagctctcctcggagtcacactgccatcactccagtgccactgggcctgcgtgggcatgccagcaaagtcacacttcagagcatgaagacgtctcacgttcttggcaggacggctctcccagctgctcctggctttgaatgttcactcccgttttgcagagcgcagtcggctcacctcgattatggaccacactcttcctccagaatgggcagggtgtcagctctaggctggcctcaagttctttgccagcgtggtttcttaagcccagctgttgggatatgcattttcttgaaagtcagggaaaagaatggagccccctgttgggctcagagcaggtccagaagtcctacttgacggttcatggcagcaaatgcataggcagcttctgaaggatcagccagatgctagagccatctgatcccccagacctggtgcgatgttgcacctcctccctcctcctcagccctgagatttatgacatggccgtgtgcgcatcgctggcatcgggaatgtataaagccacagtgcctgcttgtggcactcacacccagtcaagtcatcgtaatagagtgttagtggccttctatcatggggggaaagtctggcacaggaagaagcaggtcttgactgacaggggaattacctgggaagacagctaacgaaggggcaggggagggacagaggacccgagtgttcaaggaggagagcagccagaaaaccacccaggcacctcccgagcaggaaggcagcagggggagctgcggggactcgtgtgatttcaatagtagcgcttctgcggagagacacagcgaggaaaccttctctatggagaggaggccgtcgttcttctcaggccagacatccttgccctccagttcatagaagagaaaattgagggccgggcgcggtgtctcatgcctgtaatcccagcactttgggaggcaaaggtgggcggaccacctgaggtcaggagttcaagaccagcctggccaacatggtgaaacctcgtctctactaaaaacacaaaaattagccaagcgtgatggtgggttcctataatcccagctactcgggaggctgaagcaggagaatcgctggaacccgggaagcggaggttgcagtgagccgagattgcacattgcactctggcctgggcaacaagagtgaaactcttgtcatctcaaaaataataataatatttacagcatcttgacagactcattaatgatgtcattaccccattttggatgaggattccaagcccctgagaggagaggcgatttactctcagacacccagcctagctataagacagaaccaggatcagaaccaaggtcattttggtgtcaaagccatgcatgttttaaaatgtttttctacaaactgtcttgttttggccacgctctcagaataggtcatgcctacaggcaggtgccattgttgaggcttgttaagagtgtagagaaaaaagaatactggcaggcattgtgcagtggactgtgcatagacgatctcatttattccattgtacggtcagattagctgaggtcaggggcaggattcgaacccatgtctccctgacagcagaactcaggtgctcatccacttgccaaccagctttccacttagatcattaggataatagctactctctcagcactaagtgctaagatctcattaaatacataccaccaggggatgaggtgagaactgttatctctgttacacatagaaggaaatggagacatgattgctttgattttgacctaaatgctctcctgccccctcaccctttgatcttccattgaggtgagattgggggagtgccgcagtgtggtcctcagaagacacaccatagatacactgttagcattggatgaaaaagaagggcttcatacctttccacagaggtcggtcctcttcaagaccatttgaatttaatgctcaaagagtttccttctctccctgagtgctcagcacccctccggccttgcagtttagcctgccttagacttagtcttgcatgtgtaaaagaaaaagggaatggtttattagatgcttccagactccagaaaagtcgacaaaagttgttagttaagtcctgcctggcatggggtgttttagagtactagcagtgccaattaaatttttttaaaggactaagtgctgagtttctatatctaaatatagaaagtaaaaaataagcaagtctgagttcgtcttggaggaagtattgatgtgttgctagaaaggaaactttggaggaactgagtcctggtgtgaaggagcagaggcgaagcctgacgctggccgacagcactgctgctaagaagggcctgcctggggtccaggatcaaaacctgtttggatatttcagaaaatcaggataccaggaaaggaggtgattttccccattgatttccaagctcctgaggggcatctctccatttttttagtgtccgtcctgccacagacacctcccaggagcagggccagccaccacagctctgacagggcagtcgaagggctgaaataccagttcctagtccatggggaagtccccaccagctctcaccggagggccgtctagtcttcctatgtcaccaaagtattttttggtgttttgttttgttttgttttgttttgttttgttttgttttgttttgagatagggtctcactctgtctcccaagctgaagtgcagtgttatggacatggctcactgcagcctcaacctcccaggctcaaatgatccacccacctcagcctcccaagtagctgagactacaagcatgacaccatgcctggctaattttttatttcttgtagagatggagtcttgctgttttgcccaggttggtctcgaactgggctcaagcaatcctcccgccttggcctcccaaagtgctgggattataggcgggaaccatcacgcctgccctgccaaagtatttttgtggaagaccaagactgaaaactgtgtaaaggagccgggtgcggtggctcatgcctgtaatcccagcactttgggaggccaaggcgggcggatcacttgagttcaaaagtttgagaccagtctagccaacatggcaaaaccccatctctactaaaaatacaaaacttggccaggtgcagtggcaggcgcctgtaatcccagctactcgggaggctgagccatgagaatcgcttgaacccaggaggcggaggttgcagtgagccgagattgagccactgcactccagcctgggcaacagagtgagactttgtctcaaaaaaaaaaaaaaagattaagcaatgcctaagggcttgttttcgtataaaaagcagcagttttcatgctgtttggaagtgctttgttcctaaagtatgtggtatctattttgcctggtatattacccctgattttattgaatcatagaattcaagagttctgactaagacttctctggagccttagagctctggcacatcttctagaatggcagttctccaagtgtggttcgctggccagcagcagcagcatcatctgggaatgcattagaaatgcagattttgaggccaggcgcaatggcccacacccagaatcccagcattttgggaggcaatggcaagaggatcgctggagcccaggagtttgacaccaacctgggcaacaaagtgagacccccatctctacgaaaaaaaaatttaaaaattagccaggtgtggtggtgcacacctatagtccctcgcagctactcaggaggctgaggtgagaggatcgcttgagcctgggaggttgaggctacagtgagccaagatggtgctactgcactccagcctgagtgacaaagcaagaccttgtgtacaaaaaaaaaaaaaaaaaaaaaaaaaaaaaattcttgggctcccctccaaactgactgaatccaaaactctgtggctggagcccccgcacctgcaccgtaacaggccctccaggtgactctgctgcatgctcactcttgagaaatagtgattttgagcatcatagaagaagaactcaggtaggattcaaatcccatctgtgcgactcactcattctctacatgttcctttacctcctggtctcagcgttcctgtctgtagaatgggataataatcaccagtctggaggggttattgtgagaactgctatgaaaaggcacgaaagcacttagcaccgtgtgcctcatacagagtaagcatttgataaatggcttatcattattgttattagctagcttcctagaccaggtattcatctttttaaacagtaccccagtcagatggttgtctggtgagaggagattcaaaaattctggtctatttcaatgaataacagctatggctgttaatagttatatattgagagaatatttgccattctgtaatgtccattctttttttttttttttttttttttttgagacagagtctcgctttgtcacccaggctggagtgcagtggcacgatctcagctcaccgcaagctccgcctcccaggttcacgccattctcctgcctcagcctcccgagtagctgggactacaggcacccgccaccatgcctggctaattttttttgtatttttagtagagacggggtttcacaatgttaaccaggatggactcgatctcctgacctcgtgattcgcccgcctcggcctcccaaagtgcggggattacagacatgagccactgcacccagccttgtaattcccattcttgattgtagctctgtcccctagaaccattggaacaagacttttctacatggccttgttcagatatttgaacatagtgatcttggctgttctgagctttttcttgttctatttccaaagattaacttaaacatagaagataattgcagccagtagggagggcttttaaaaaagaaggagagaaacagaaaaggcctgcagccaaggctatgctttggtgacatgggtctttggagatttctggtaggtaaggatgcctgtgagtttaaggttgaggctttctcagatggacttgggagcctgcagtagacatggtgggtggaggtcactgttggtaagaattctgccttctgccactggcgggtgtgggccagagtcacccctagggtgtttccatgtaggaacagtggggtgttctagacacaaatgccttaatatccagcatctttgccagggggtctgctccaggaccccagcccttttcctgctgtggtctcaggcctttggcaagctgcccgtgctctttccagcgtcctgtttctcacctgggttgccagctccctgcagccttggtggtgtttgcagcctgctctcagtttttttaatctttttttaattgatgtctaattagtagttacgataaattgcactagccaagcaaatgctacctttcctaaattacgccgtggtattgtgtacgacagcagcagggttgctattttaaaatgggattgcgtaaaataaacatgtgcccagatgacaggaagtactaagttgatgattaattgatgctctggtacggcctcgtgctttccagtgcttccatttgtgtgacgatccatctagtgaagtttcagcaggtccacaccactgataattgccagatcgctaatttgcagttcgtctcctgccctctcatgccggggccggtggccattatgaggcaatgcagagcagtcctcagtcccgctgaaggtcagggtcaccagaaggtgatgtgcggccctcggctggccaggtcttctgcagctcggagactgcctctctacactgagactcaggaacggtgacattgctgcattattccggactcttgagactggtgctatttgtcctgtcattttctttgtattatgtagggctgatattcagggaaagggaaaataacttagatttagttttatttgtttttttcaaattaggagatgaagacttgagcctgctgacacatacccaaggcttgctcatatgtgaaataggtagaagtttaaatatgtcttgagagcagttgagaaaagagtcagtggaaaaattactaactagtgctggtgagcagggtctcgacagcacagggggtacgggtgtgccatctcaaaagctgccctggtgcttaggccagagggcttcacccaagtgtggtgctgcttctgagaaacgggggtgctgtggtctgtaccccagcctggtggattaataggaagcagcagaagcttgagccaggtgtcttctggaacactaaggaggcaggacagtggcagagtccccggactcagaccactctgcctcttagcagctatgatctggggcaaggacttcacctttctgaatcttagtttcctcatgtgtgtattctctacctacccaatagctcttcccatgaggtgtgggagattaaatggcatcatcgtttatttaataaacaagcaaatggtggatggggacaaagcacctagctcagtgcacagcgtgtgaccactctgatatggaaagtgccagcactctcccaggcgagtacagcagtggcagctcctttgtaactaggcgttgcttggtaggatgtccctggggttggtccattaacctccttttctctcggggaaagggccttggtgcaattaacagcttttaagccagagaattgatgcctcttgctccagtgttcttgaagcctcaagaagtctgggacccccagaaaacaggcaggccagttgcttttatcttgcctgatggctgtctctccagaggtagcagtgacaataacaaccaacacgtggctctcggaagcctgactgactccagggcccggtgctctctactgtcggcactgtttctgttgtccaggggcagcacccacagtgcttcctctgtgcaccttcagcaagacagagtcgctcaaagccagtcttcagaagggacccagggttgctttagccatgagaccccatgtcagttttcacagtgacttcactgtcctttcgacaaagtccttgagatcttgatggctcacagtggacttcgttcccaggacagggtgagtggactcagtagacagcttggaatccactctaagctgaacagtgctcctctgcccacggtaggatggggagggagtgggagcccatccttcccttgatattttattctaacttacgtatttaattgacttttactactttttttcttgtatcacactatacaccaaataagttccagaatgatcacagaatgaaatgatttttttaactgataaaaagaactagaaggaaaaaaaacaatagctgatacaggaataggaaaaacctattctaagcataaaaaccaaggaagacatcataaaggaaatggctggtcttgaaagcctaaaatttttgaattatatacttcaacaaattcagtaaacaaaattagaagacagataacaaaaaggaaaaatgtaaacatatataacgttgatataattacttaatattcatagactttctcaagttcaaaataagaacactaggaaaattaacaagaacatgaatacgatattcacaaagtaagaaatacctatttccagtaatctgttaagcttttactagttgtcaaaaaaacatacttgtgagttaattttatttatttatttatttattttcagacagagttttgctcttgttgcccaggctggagtgcagtggcacgatcttggctcaccacaacctccacctcctgggttcaagcaattcttctgcctcagcctcccgagtagctgggattataggcatgtgccaccacacccacctaattttgtacttttagtagagatggggtttctccatgttggtcaggctggtctcgaactcctgacctcaggctatccacccacctcgacctcccaaagtgctgggattacaagcatgagccaagtgctgggattacaggcgtgagccaccacaccctgcgcaagttaattttctaacagtaaaaacttggaaaaccctgtatcacttttttttttcttttttttcttttttttttttttttttgagagagtctcacctgtcacccaggctggagtgcagtgacgcaatctcagctcactgcaacctccgcttcctgggttcaagcaattctcctgcctcagcctcccaagtagcttagattacaggcgcgcaccaccacacccagctgattttgtatttttagtagagatggggtttcactatgttggccaggctggtctcgaactcctgacctcaagtgatcctcctgcctcagccttccaaagtgctgggattacaggcgtgagccaccgctcccagccaaccctgtatgattaacagcatgactattcttacagtgatcatatactttggtgtctttaaaatcatgtaaaagaataagaacttgaagtgattaaaataaattcacaacatactttgtaagtgaaagtaattgggttaaaatatatactacctctgttttttaaatgaaaatgaaaaactcaagagtatacatcaaaatatgaacagaagttatctttagctgctgtgcttctatagtctttccatttttaccaaaaaacaaatactttaaaatttttaagtgaaaaagaaaatggaggtcagatgggttgaagcatctagaaaaatcaaacgagagtgtgctgaggcctgctcctctcttgtggtgggcacctcatggactttccctggctttctccttgtcttcgagcccagccctcctcattctctgctctccagttcctgctcctaagaccctgcctgtttctcctcaggactgagcacggaaggcatctaccgggtcagcgggaacaagtctgagatggagagtctgcagagacagtttgatcaaggtaaagtgcagcctggccaggcatccgaggccagagctggtcaaggcagacacagctgcctcggtgaactgtctgtggggcttcggagcactcctgccagcacagacccaaagccacgaggtgctgagactgagaaagagaccatgtgtggctgcagcggggaggaggggaccgggtcctgtcagtgaaccgaagcaccatccctgcccaagctgggtcatgtaggccactccccacactgccactcacagatgctcttccaggttgcccgggcacatgcctccctcaccacactgaagagctttgcctgttttcccatgcagagctagttgcaggcacatgatatacaagtcgggttgagatgtgatcctgttttgccagggcctcagatctaccctcctcacaaagtcccagcaccagagaaagtgagggaccatcgtgtgaggagctgagcccttgggacagagacccaagttacatagctcttggcagggactcccttctcctaagctgagccagcttcaagaggcctaaagtcaggcagccaaactacctcttggaattgcccacactgtgggatgagaagccacgtcccccagtgccagaagcaaaagcaccagagcagggcacattcccatctatcagcagccagggcaggaggcaccacccagagtggacaccacacccacttcccaggtgggcggcccttgcgccttgcagcaccgcagtcgggctcagctggccggcagcaggcagaggggaccgcaggacagggaaacgcctgctaatctgtgggagacacgaggccaaagtgagggtagagcccccagtgtgggatgcatttgtatatatgggagatcctgtaccagcttacctcccccatagtggaacctggtactgtccatctgtagagatttcttcgtcatcaggaacgcactgaagtatgtatgcaatgagaaggaaagcatgacatgggtcagcggtgcctgtggctgggaagggccagagagagaaaaaatgagcctatttgccctcccaccataggggacaaggatggaggcagcagtcacagtggttgctaacatctttgtgacctacctggaaagcgagccaccctttaggaaagccgcctccttcttctgtgatgggaagggagtaaggaagaggcaacagcatatcaaagccagatgaaggcaagctcctggcaccaaaaaccagcatgtgggggtagcacccctgccccgagagtggtagaaggggcagttcagcagtctcggaaagaggtgctggggccagcccatgcctgaacctcagaactcgcgttagcgctcacaagtcccacccctccaatccttgccagtcctgaggccgtctctggctccttgaggtttctctagcctctcctgagccccgagttgtcctgatgcttctgcctggcttagaatggtttggcctcactctcctgacttcctttcagaccacaacctggacctggcagagaaagactttacggtgaataccgtggctggtgccatgaagagctttttctcagaactgcctgaccccctggtcccgtataacatgcagatcgacttggtggaagcacacagtgagtaccggcagcccagtgttgggcggattgagggagaaagggcttggcactggaagaataggtcctgccctcagaatggatgctggctgttagagctgaggtttgaaggacagagggcaagggaattaaccagatgacagcaatgggacttgcaaatcgggctcctgcccttgtagaccttaggtgcttatctgagggttacaccaagagagttgcaggtttcccccaaactctcattagttaagagcatggtttcggtgtcagacttggctccttcgcttgtggccgacttaaccttccctgccccttgtgtcctgccgttgttaccatccctactcctgcggatgaaattctattcggaaaggcctagaagtgaggctgtgaatagcctatttaatagtaggtcttatttttctttcccctcttcttacctgtcttctcctacctctcatgtaatgaagttaacatgggtctagggtcctacagcctcttaggaagccggcctctggagggaaagagatgactccagtggccctggccaagtaatcatttgatgctgtagcaaattagcacctctggttttaatggtatcctgtgtgccatgccaccttgcctcatcagttgttcctgccccagcctgcctctctgtagaggtgtttgtccagatgggcgagccttctcactggccagcctttccctggactttgtgtagtaccacagaggatgcctgacctctcagagcgtcccaccatgtggccctcactaccttttaagtcatcagcagccttcctgctttgtgcctctggcaggccaagacccagcagcagcccttgctgtgcagctgcagaagggagtgtctctgctagctgcccagagatcacagccacctgtgatccagcaaccagagggtggggaagaggaaaggagacgtgttcctcaggggcaagacattagtctcatcttgtcactgcccacctctaaagagggagctttaaacaagcacaatttattcacaagcctgatggtgtaggcagaaatttgagggaggtgatggatcagcatggccccgagtcctgggtcactgactcttagtagcatctgaaggagacaggtgtgcaagaagcccacccctgaactgtcagagcctcaatagtgacagggctgcggggcctccaagctcatccttccagggtctgcacttcctatggtgtctgttttcacaatctggatgccaccttcaccttattctgtccacactctcttagctgactggaattgttcacagctcctgaccctatctaagcccacagggatggggcaggagagcgtggtactcctgggagggtcatagagtagcctgctttctgaagacgggagtcagggtttctccaggggagttagtgggtggggacagttgcaggcttctcccctgatcctgctgtctgaagatagaggctttcccagcagtcacttctccagcaggctccaggcaggcacagatgtgaagtcgcatgggaaatctctattctggagccagctttctttccacggaagcttgtctcacagtggaagttaggaaaagaggaaggcgtagactgatacccagtttgctggaagccgggaattcctgtctgcatttgtcttgacttggcgccatctagaggtgcgtgaaatcctgccacccggcagaaccccattgtttctgcgggaactgctgacacagcacctttttgtgtagggttgtggggccggcaggaacgggaggtgctattgatagggaatcagccacccttcccacagcagctctcacccagcttccactgctcaggaggtggcttctggccgctgctactgcagcagcctgggaaagggtggaggtttcccacttcctcttcccattgtgtgtttcctgtccccgacggtactcagcgggggctccgttgtcttgaacctgaccgaagcgggtgggagaggagaagatcttgctgacatggcacctctcccggccatagcagttgactgaaaagctgggctgtggatgttgcagggccaggttcaactgagccgcagataccaggcagtgcaaaagttagtagtgttaagggatattatggaaaaaagatgattgtgccccaaagtagctcttcccagactggctggggtttccatggctacatcaacttgaccagttctttctacttaatccctgagagcaattgtgtctctatatgttcaggccttggaaccagtttcaaatcccatcacaacaaatatcaaggtcactagcaaatggttttgttagctccagaatttcacaatattgaacactgctgaaaatgtactcgcaaaatagagacgtttgtgattatttgccagttattttcctcccacactcaaggtgacacgtgggagattcagaaatgaacagcagcagcaaccgcaccgcccatggcctgtgtgcctgcctaggctgggcccggctctccacgaggcacttgattcccaccactgatcttcctttgaggaagatggtattataatacatctccattttacagagaaggaaacagcttctcagaggtgatacagcctgcccagggtcacaccgctagggagtggcaagccggggcttgagtccctgcgtacgtgggtgcaaatgaagttctctgaagacagagcaaagctgagcttgaagtgcacaaaccccagcaaggaaggcgcgaggaagagggcttcacaggggagatgggccagggtttcaggaggcagaagaaaaggcttgcgctgcctgttctgtctcctacctgtagcccacccccaccttcaagagtcgctcttgcctggtttctccccgtctctgtgactccctcctccctgcctatctggagtcgaccccgtccagctggtgtccacaggccctgtcctatggcttttgtgctggaaggggtgctagagctggctccgtctcaagccagagggtcaggaccaaaggacctgtggctccagggtccgcattaactccctgtaatagctcacaaaattcagtctttttaatttaaggagagaccagtcattttcatcacattgttgaaggggatgtgtgacccgaacatggttcaggatgccagctcattgtctcggcctttccatttgacagatgagactgttggggctagagataacagtgcagcctaggttaccaggggacggccctgctgctctctgggctcttgttcaccagctgccttgggacgttactggttctgggatcctgccttcctttgatctgtccacatagctgcccgagggcacgggggtgcttctcacacccacgtacggggtcattaatttcacagctagccaggccccgtgtggacagggacagatggcagtgggcacacacatatgtggtcccaggctcagtctggtgggacaggacattcaacaggtgattgcaaagccgtgtctccaggggaaggacagcttggattctccatcctgagccctgcagagtgaggtcttggccttggagttgtttaccacctggggcggggagagccgacgccggacgagcctgcgtgatcactgaagggctgtgaccttgagccgggctttccctttcctggcgatgcaggcgtgcagatggtcagcggcggccagcagggactttcctccaggcaccgagctggcagcagcagacccaggcctagagcttggttggcagcctggctgccagtgatggcaagtggcgcagcacagccagggcaggagtgttctttgggaacagggtctctgccgccactttgtttgaccttggaccggtattctggctttgtgaggcctggtgtgtctgttttgtaagaggtatgggaagctaatcggtaaggtccctgtgccctctgtctgtcccctcccctccctcctgagttcttggggtctctattgtactaaattgctggatctgtgtccaggctgtcttggttcaactggcccaaaaatgcctcccttggacgtttcttgttgtctcagtcgatggcccctaagttcaaaagtatgatgtcccaggaagaggtgcagctcccagcccacgccccctgagcaagagcagagccacctggagccaagccaagcaaaggggtgagcgcagtgtggaggctggggtctcctccataggccaccttctctcccggcccacgcccctggactcctgtctacccctgaccacacactggagcaggatgggttgtttgttgttgttgttgttgttagaaaaaactaagtgtcttgactcccaaagggcaggctgagggagcagaggatgtgaggatcgggccctccacagtctgggtcctgaggggactctgaagggggtggaggttacaccaaaagtctggacgagcggacctgggaatccacaaaccagcacacgccaggtgtggggagaagccaccctgggcacctgtaccatggcgggtccgggttgcagcagctcacccagggctgggtgccctgacggccctgtcccagtagggacaccagggagcccattgcccctgctgtttctttggccagtgtagacacctggccgggcgggctacctattgaagctgggggtccctgtacagcagggctccactgaagatggtgagtggctgccctgagtgtgccgctgccctgtgaccaggtccacacagactgtggccccagccttcggcagcaccatagggtagaaggtgtccagggtgcacgggctgggctggctcttggccaccagcttgttccccaggcctctggcttggagcctcgggagtctgtgcttgaccacacccaggcccaggttggagcgggatagcccagtcagcaccgtgctcagcaagtagcagccagccagaggcgccgtgaactcgccggggatgaggatggtggtcaggaggggaaacagaggcagggccaggaaggcctcgaggagccggcccagagctcctagactagagaggcacccactgggtcctttcccctctttccactagaccgtaagcggcagggaatttggtttttgtcccctactgcatccccagtgtgtaaaatagtacccaggcaggagcgggtccccgtaaatatctgctcctcccacccactgcggatgaacaaatgacccaaggaggaggggcctcccaaatccgagaatgaaagaattcgcattgtctgacaaggcaagaatggggcgctgtcaccacacaacctcacccatccccacgtgctcagcccagcccttctcatgctcacctgcctctgggtcagagtcacctcctccctcgctgaggactgttgagggacctgtgcctggttccaaccagggcagctgaaaatgccacacagggcacagacactgctggtgcctcccccagtcctgagtcaggggagggtgggtatagaaaaaaggctgggtacagtgtgactgggtacagtggctcatacctgtaatcccagcactttgggaggccaaggcgggcagatcatgaggtcaggagttcgagaccagcctgaccaacacggtgaaaccccgtctctactaaaaatacaaaaattagctgggcctgtaatcccagctactcaggaggctgaggcaggagaattgcttgaatctgggaggtggaggttgcagtgagccgagatcgtgccactgcactccagcctgggcaatacagtgagactccatctcacaaaaagaaaaaaagtgtcctagctggtgaagccagcaccctggaggccccccatcccctgtcctgtcagaggattactacagtcagagagggctctgccgcgtgcagggaggcggggacccagagcagatgggctaagctgggagacaggcctgggtcccatccacctttgccatcaccagccttgtggccttctcttggcctctggagtgggtttctcagccaccatatgggtaacgcccagccccaccttccactcgggtctgcggtcagggccatgcacagagcactgtgaagctgtcctgccagcacttgggcagcacccaaacctaagcagctactggtgcctttgccatgtgaagaggctgcagctggagcctagagtaggtccctccccagagaggccctagaggggtgagggcaagctttgcttaaggaaagaggtgaatggggctgagtcaaaggatgttcacaaggtcgaccttgcttttagtgtgggccagacttgagcagaagggcctctcgccctccttgacctctgcccagcgagctcctagtgctgctcagtactcaggagcacctggaccaggcagccagtggggaggggagcaggcgaggagactggccacccgctcctcactaggcgttcggctgaggtgcatatgcagaaggaggctgggattctagggggcagcccctaaatttattttttttctttttgagatggagtcttgctctgtcacccaggctggagcacagtggcacgatcttggctcactgcaacctccatctcccaagttcaagtgatccttctgcctcagcctcccaaatagctgggattataggcacacgccaccagacctggctaatttttgtatttttagtagagatggggtttggcatgttggccaggctggtctcaaacccctgacttcaagtgatccacccacctcagcctcccaagtgctgggattacaggcctgagccaccgcgcccggcccctaaattattatcaatgcaggctttgtaactcccacccctgcccctccccaccccctgaagaagaaacaaaaccacccgccttgctactcatcagataggaaggagagcaggcatctctggcagacctaggctttgccagccccgtttcctgcctccagccagaggacgggatgagacccagctcttatgtaaaggtgctaccactcgatgcctaattaagacaaacacagctgtgtttgggtcgtgcaggcacctacggagagacctgtgtcctcctgtgccaagctagcagctggaagggggcatgacgattttattaagtgaagctttacaccacacacatgctgcttgtgttttctaatacggtcttctgtcctccctacagcagtttactttgtttatgtaaacattttattgtaaaatgacaatgaattgtttgaagactcaaggtcgtagaaaagagtgtgcccatggccgggtgcggtggctcacgcctgtaatcccagcattttgggaggccgaggcgggtggatcacctgaggtcaggagttccagaccagcctggacaacgtgatgaaaccccgtctctagtaaaaatacaaaaattagcaggcgtggtggtgggcacctgtaatcccagctacttgggaggctgaggcaggagaatcgcttaaacctgggaggcagaggttgcagtgagctgagatcacgccactgcactccagcctgggcaacagagcgagactccatttcaaaaaaagaaaaaaagaaagtgcccttgaggtggaacccttaaaataaaccttggattcagagagatgaagctgctcatagcccaataactagctcccaggacttttttagtcatttctgatagacagatgttaccaagacactgctcttatcaagtcacactctcaaggccacagatttgccaggtttcattcctcctcattaggctgcccgggagagctcctggagctctgtcccttccagccctgcggcctcccttccccacaggctcctgcgagtagactggctcccaggtgcccttattttgtgtccagctgtgaactcttcatttaattgccaggtgtcaccgaatgaaggaggcactgtccacagccccttttacagacaaggagactcaccctaaggtgtcacttgcccaaggtgacacggttgacgcgagaggccggatttgtaccagggccatctgagtcaggatctggactccagaccaccacaggaccttcctccctgctcagcgtgcccgtcattggcattctgtctgctcttccaagtctcactctcaccagggtgcttgtgcaactcccccaactctgaccctctgggtacgtcacctgctgcaaggtgactaggaagctatgggtttcccaaagaatgcttgcttcagggctgggcgcggtgactcacgcctgtaatcccagcactttgggaggctcaggtgggtggatcacgaggtcaggagatcgagaccatcctagctaacacggtgaaaccccgtctctactaaaaatacgaaaaaattagccggcgtggtggcgggcacctgtaatcccagctacttgggaggctgaggcaggagaatggtgtgaactcaggaggcggagcttgcagtgagccgacatcgcaccactgcactccagcctgggtgacagagtgagactccgtctcaaaaaaaaaaagaaaaaagaaagaaaagaatacttggttcagggagtccgcacccctcccggattcatcagcagaatggcacacatatgtctccggccgagacggtctggcaccatcatctatcccaaaggagcccgagcccccgggcccattagcaatcatctgcgctttaacaggcctctcttcaccacccccacagccgccagctgtgaggtcgctgccatctccttcgtgagaccctcctgtggttcttctgagccctggagtccacgaaggaaacatgggggcatctttccctgcacagagaaatctgtcttagccagctgggctccaggtgggctctgggacgtttgtgcctcaccagccccgatgcccttcccagtcaaggtgggccacacccactcggggatggcaagcccagtggccacagctcaggccccacagccagtcccagctctgcaacttctaaactcagatacttcatcctcaaaatggggtgacgagttcctgcctcacacgattgtggggactcatggaactgggcctggcgcgggttacaagctgcattccaggcagttgttttccctcccccaggacattaggattccatgataggcaaagtgtgggcgttgggggaaaagggggtgcgtagttcctttggtgaagtgcataagaattcccccactgtttccatcagcccctccaacggggatgtgtggacggtccctgtgtctctaggaaaaggacagagccttggtctcatgaccgactgactccctccctcgaaggcctgttggcgtgggtgggtggcagcggccgcccgtctccatctggtcaggaagcaagcaggctttctgcgtagggatgcctgtctccaggggcaaccggatgagcaaagaatggtgttctttatggcggagtgtctccagattgttctgtcttgggtggtgggggccaggaagccccaggcacacagtgccgcccttcagcgggggcctgggacacagaggtgggccagacccctgggccagtgccactgccaggtgtgccagccttgggcacaggctttgggggaaagagtggggttagtgtcatccaaaagccctgggctgtcctcagagaaggcccatcacagagcacgccctggggtggccaccagcctcggccatgaaaggcaaggctttggttttctctctcctcagaaatcaacgaccgggagcagaagttgcatgcccttaaggaggtattaaagaaatttccaaaggaaaaccacgaagtcttcaagtatgtcatctctcacctaaacaagtaagtcgcagggccttctggttggtttttcctcctgaaaattgacagccagggtcagtgtgtcgcagaacaaggctctgtccacaagccagtagaagcctcaggccctggcctggaaggggtgctggctggcctcccatggtgcccgctggtctcggtgcccagagcctctgcctctcgcccatcctcaggcctccctcctgctcctgtctgagggcagcccacgtggcctcaaacctgcctaacaccagatagggcacttagctccagcgggcatggggcctcttgtaggcctgtgtcccaaagctggcagagagagaagatcttctggttggtactgatgctccagaaatcttctcctgaatcaaaaacacctcagagtccctgaaagtcctctcacagcattcacgttcccagctggggagaaccgggacactgcacctcgagagatgtgctgcaggagacagccagcctccggcatggagcacagccgcaggcgggaggccgtatggttgttccctgaagttccatgtgtgtggaggagatctgctggccgagtggcctctgatggcgctctggcttaggacactcagcctccctccctcgtcacagccggagcaccgccactgctttggctggctgcagagtgagtccctgaggtggtccatccacccccaggggtttgcggggctccaggcagcctttccgaggttggccatgtagaggcactgggctggaggggagaggacactgagggcgcagcctcccaggcagggcagggtacagagagctgcgcatggccttttctgctccacctgagggaagaaaggtgggctcagcctgggtgctgaagaccatgagcgcccagggccaggtggggccctgcacagttctgaccattgagtttggtgtcgcccgcagggtcagccacaacaacaaggtgaatctcatgaccagcgagaacctctccatctgcttctggcccaccttgatgagacctgatttcagcactatggacgccctcacagccacgcgcacctaccagacaatcattgaactctttatccagcagtgccccttcttcttctacaatcggcccatcaccgagccccccggcgccaggcccagctccccctctgccgtggcttccaccgtccccttcctcacttccacgcctgtcacaagtcagccgtcgcccccacagtcgcctccacccaccccccagtccccaatgcagccactgcttccctcccagcttcaagccgaacacacgctgtgagccaccaagacctggggcgacaggagaaccggtcctctctctgacggggtggcatttggccttgaacaaaaccaagtccactggggacagaggcaggggcaagtggctctccccattaccttctcaagacctcagtgggagcaccagccaatggtaccatcggctgggctgccaggtaccctgggcctggcgctgcagacctgagctggcttggacccatttgaggactgaactaggcaggcaatggctccagtgccctccctctgttccctggaccaccaccccacgtagctgctcacaccagcctccgggtgcctccctctgcttgtacagagcccatggtcgggacagtgccctggcctttgccggggaggaggatgctctgagattcagggtggggctggcaacccctgaagagaacacttcctgttggtctgtctcttcccaccttccatctgcacacacccccaaggtaagggtacagcccggctggcggcctccttgggaacgtgtaggccacggctctgccaccactaggtacctgctgagggcgctggctctgcagatcagaacaacggaggatagctttgtgcctggacccagagagtgtgggactccccgcttcatccccaccgtcccactccacagccttcccgaaacattccctggcaaacaaaggaacactaggagaaaaaatggaaaaacccttccagtaattaaaaaggaagaaaccacagaaagaaaactacagacctcaagattccactctgtgcccgcctctgccgggagggagggaggcacacaggtggagctgaccctcgtctttgtggcagcaaaaccaggatgcctggagctgtggcctgagggcctgctggggtcccactcacccacttaggtctagtcgctagatcccccgttttcccaagaagagggttcgagcccttggtggggacagctggggagatggcagtgcaggctggaacctgggctgccccagaacacagtccattacgatagaaacactaattgagcatgtgcgtggggtgggggtgtgtgtgcacatgtgagtgtgagtgtgtgtgggcgcttggtggggggttggggacagctggaaggtgccaggtgcacttggggttggggttggtgtgttgggtgttgaagtggaatcgtttcatcccagccatggaggccaccagcaggagtgttcatggggatgtgggcgaggtggggcactttgaaggaatggcggtctgctggtgccctcgaaggggcatccttcctggtcttcgctgacccagaggcgctgtgcctgcatatcatccaccaccaccctagcccagccttcccactgccccaggaaaagctcttctcctggccacctctgccccccagcacctcaaacttgcatggctgggctgtggcctctgcggccaggaagcctgacactaggcaccccccaggcgagagctagtggggtgcagagggccccatgccagacagcccttggggctcgttgcactttaagaaataggatctgtggtgtattccagggggcctgatggacacctttcccgggcgtctgcagctgccctgcccgtgcccgcctgcagtggttggagacgggagtggcccttcggctcccgagctccctctggggacggctggctcactgtctccagttctcaatggccaacgaaggtgcttggaaacacctaaccttgcaagttttaccgccttttgaggaacacaaatcggagaacaaacccagggttcaggcgtgttttctgtgaatgttggatgatgaatttttgtctcttctggtggagctgtgcctggccctgtaggcccagggttggctggaaggtgacatctgtgtttcgttttagctgaggttggcagaaacgttcccaaactcccccagccctggaccccagcagatgaggaaacggccccatttactgaccccgcccccttttcgaggttatgctcacctggtcagctcctcacgtaattgggggtggagggaaagcatggtggtgccctgggccgtccctgtgtgaacgcaggcaaaagcagcccagtccccctcactgcttgagctaacactgccacctcttttgtgtgagcacaaaagccacgtcccaagccacctggcccgattccacagatgtatgtgcggccagtgacttccccaggagtgtggagggggtggtgaggaggagcacctgggctctctacccctctcctcacagaagtacctgaaactaggtctggggcactcccaatgcagcgccttgtcagccaaggtgggcaggcagggactgtggcagcttatgtccaaagggagcccccatgcacaggaagccacagggttcctcttgtttcccccgctaacttcagcctctcatctgctgctccgggctgagggactagaggacatctcggtcgtttgaggggcatggccagtcgtggcaggccggccttcagcgtccggtcagggaagcgtgcagcccaaatgggcacttgcatgggagccacagaggagcgtccctggggattgttgggaccatgctgcccccactcccgcttttgttggggctctaagttctggaaggtgtgtgcacagagggtgctcatgggactcgcatgcagctctcagcactgggtgggagggcgttggcttgtccagaatggggacgtggggcagccacccctgcccagcgagagcgcagacaccgtgtgaggggacagcagcccttggtgcaaagccagagactgatcctggctctgacggctgaagagggaagacccaaggctgggtggcgtggctcgtgaatccacttagaattcttggcttgtgtcgcatactgggtgtcacggcacacatttactctgcattgtccccgtctttcccatcgcctagcgtttggggaggaacagggagagagcttcggggcgtctgtctccgtgctctcctgcctccaccgccttggttttgcttcctgctggaggcagggcacctgctgcgacccagattcttctgcaggatgtgtctgtctttgtcacggtggacagagggtgacatcataggagcagctcgctggccagaaggggatgggggcatccctgtgcctcactcagctcctgctgctcttagggaaaggaggcctgggtcaagccagcatccccttggtaaagacccccgcaggccaccaggcattctggacacgcacacacacacacacacacacacacacacacaaaacttcacagcaggccagctgcagtgacttgtcatcaagagtcacctcagctgcgcccccctcccatcctttcctatgagaagccactgctttgggggcgccggctagaaaaagtagggtgcggtggccaggagggcccctgccgcgcggggggctgggtctggttgagtcgctgctttcccgagggcagcgcagggatccggggaagctgcggcagggagcgggcgccggcttcgtggctctgaggtgtaacgggggtgggctccctccctcggaggacatcgtctgtgtccaggtcagaaagtggcccaggaagggggcagtttctgtcgcgggtccggtgggggcgcggccgcggtgcggtcggtgcagcgtggccaatgcgcggcgcgcgcgggggacagagcaggaggcggtctgtcacctcggccactgctgacctgggctggcctcccccagccctcccgtggcggagccggcagcgatgctacaggcctaagttattgtttgcataaaaagaatcatgttccctgtgtacatttaagaaaaaaacaaaaaaacggaaatgtcagaattgtatggaaataaaacttgtttgaaaatttggaatagtgctgctgccagcttatttttctggtacttgtattttcacatgttaaatgatctttatatatgttgaattaacaaatattttgagtttctgagaaaaaacaaaacatattaatggtattgaaatgtgttagtagtctggctgtgtgcccaaaattctgtttcgcagcaaaagtgaagacctgtatgtaaagaaagtataacaattatttctttgtattttaggggctttaaccggaacatcgtctagctggtgttaggaatgtttgcttaatttccagacttttttttaaaaacacatcgtgggttttttgaggctccaacctgattagtgcatggtcagccctcaatgaaggctgaggcatctctgactgaggtgtttttgtttggttttgttttttaaaatcatgtatttgctacaaagtattgtacttgtctcaatgggaatggtgtaaaaaacaaaaggccttatgtgatctgtatcatagttaataaatgaatcttgtaaaaaaccaaacctgagagaagtgaaggggggcctcctccttaccgggccagtgcagcacacaccagggtttcacaggcttaggcgcccggggggggaagcaggaggctcccacaggagaggcctcggccagcacgagccccccctcccggctctcacctgctttcctctccagcacagcttcccagaaggccgcgtcattcctgtggtttctcagcatcacctaaagtgcctcccacaaacccccatggccgcaggagctgcaggcaggcgtggggaggggatgccagaggtgccgctcctgaccttccttcccactcccctccggcctgaggccacgcgggtggtaccgggagtcagatgcccctgttcacttcctgggtgagttccaggggcagggtcatgagcaggcttgtggccaggaggtggccgacctcagacccttctcaagggaggggtcagggctgaagttctgagaggggagagcctaaggtcacactcactccctggtgctggccctggggtcagagacccaggctctatgccagagttagccaccgtcaccaccgtcatccaggacagcacctccagggacggaggtgggctgcttcccaaagaagccttgccaccaaaaacacctcctctctgctcaccccctaaaaaactctcgttaggaatatcttcctctttccagtctcccaggctcaagtttgctctatccttggccccctccttacttacccctgactgcttctaagatcccaaatgtcacttgagcgtgactctgctgttccctctgcctccattctagcctagacctgaattcaagctcactagactctgatagacacccccacacactgaatggcccccctgccctcaatattcatggcagaagagtgaactattcagcatacaagatgcatccttccctgcctgtgcccatagcagacatggctagctgatcaccgcactctgccacacccctctccaggcagccactgccaatcaataggggctggcaccagagatgacgtctgtttgccactgcctcagccaggcaggcaaacaaacggagatgcctactgaccatagcccaggctccttggcatccatgcagaaccccacgctctgtctggatccatcctgctcttctctcccactcctctaacccaactccccaacatcagtcaaaattagtctttttttttttttttttttttttttttttttttgacagagttttgctcttgttgcccaggctggagtgcagtggctcgatctaggctcactacaacctccgcctccccggttcaagggattttcctgcctcagcctcctgagtagctgggattacaggcatgcaccaccacacctggctaattttatatttttagtagagacgggatttctccatgttggccaggctggtctcgaactcctggcctcaggtgatccgcccacctcagcctcccaaagtgctgggattagaggcgtgagccacctcgcctggccgagtctcattcttttgagtgcagctggctgctttctgcttccagatccttgctttgagcacttccctctgcctgaaattccttccatccacccttccccaaacctctagcctgcccatcagatcctaccctgttcttcaaagccagtctttctccagaaacatccctgaccctctccactcacggattcaccctgcagctgggatttacctgctgggggtttatgtcactccccgtgagcgctccagggtttctcctttgtttttttgaattaaatctctacatcctcctggtgtgcagttggtactcaatgtgtgctgacagaaacctgtcttctctatttttttttttccttttcttagtctgttgtccaggctggaatgcagtggcacaaacacggctcacttcagccttgaactcgcaggctgaagcaatcctcccacctcagcctccaagtagctgggactacagaggcacatgctaccacatctggcttttttttttttttttttttttttttcagagatgggatctcgctctattgctcaagctggtcttgagctcctgggttcaagcgatcctcctgcctcgacctcccaaagcactgggatgacaggcatgagccaccatgcccggcctgttcctcccttctttgggcaaaggctgagccatctgggggccccgctctgtgctaagctgggttgagggagagaccagaaccagataggcagtgggctctgggtgctgactggccaaggagtgtcttttttttttttttagacggagtctccctctgttgcccaggctggagtgtgatggcgcgatctcggatcactgcaacctctgcctcctggattcaagtgattctcctgcctcagcctcccgagtagctgggattacaggtgccgccaccatgcccagctaatttttgtatttttagtagagatggggtttcaccatgttagccaggatggtcttgatctcttgacctcgtgatccacccgcctcggcctcccaaaacgctgggattacaggattacaggcatgagcctccatgcccggacttttttttttttttttttttttttttttttgagacaaagtcctgctctgtcgcccaggctggagtgcagtggtgtgatctcagcttactgcagcctccacctcccgggttcaagcaatccttccacctcagcctcccaaagcactgggagggcaggcgtgagcccctgtgctcagccttctctcgctcttgctcttcaagacttgtgtgctttctaaacacgagcctcacaaccaccagcacccacgttgagagctttggggggcagcttcgcggctcccagataggccaccccaggaggcccaacaagatgccttatgcgtggtaagccttcattcggtttttcgaacgcggtggtctcaaccttgcccttgacctgccccatctgtaaaccaccctctcccacgtgactccagcctagacctccgctgcaagcaaaacatcatatccacctgtctatgacactctacttggggactccactgtgacacacccacagccaaactcctgaccctttctccaaacaggtccattccccaggatccccccctcaagccagagagagaccctgggggcccccttggggtgtctctctcccttccagtcaaccaggtacaactcccagttccattttgccttccagcacactccccttcctgctccctgcaccccagccctgtctgatctcaccaagacatctgccctccatgctcacccactcccatctccatgagggcagatcagatctcacatctagccatgtgtctcctcccgtaacatcctccagggatctccaatgcccttagaggaagcctgaactcttccacagggtcccacccccgaccccgcccacctcccaggagcctttccttgcactctggtccagatactccaactcccctggggcctgcccacctcgggcattttgcagtattgtcccctcctcctccaagactgtcctcccttgaggccatcccaccttgctaactttctcctggtccttcagatttcagctcctcagactcctccacagggaaagccctccctgactcccccagccaagatgggtctctttgctttcagatgagatcgagtgggttcagggtgtatggccgtagactctccgtgctttcaaaggaaaaaaataagttctttcagagtactttctgagctgagcatggtggctcatacttgtcatcatagtgctgtgggaggccaagagaggaggatcacctgagcccaggaattcaagaacagcctgttcaacaaagttagaccttgtctctacaaaacatttctttttttaattagcagcttggggccaggtgcagtggatcacgcctgtaatcccaggactttgagaggccgaggcgggcagatcacctgagatcgggagttcaagacacagcctgagcaacatgaagaaaccccgtctctactaaaaatacaaaattaggagctctccctctccgtctccctctccctctccccacggtctccctctccctctctttccacggtctccctctgatgccgagccgaagctggacagtactgctgccatctcagctcactgcaacctccctgcctgattctcctgactcagcctgcggagtgcctgcgattgcaggctcgcgccgccacgcctgactggttttggtggagacggggtttcgctgtgttggccgggccggtctccagcccctaaccgcaagtgatccgccagcctcggcctcccaaggtgccgggattgcagacggagtctcattcactcagtgctcaatggtgcccaggctggagtgcagtggcgtgatctcggctcgctacagcctccacctcccagccgcctgccttggcctcccaaagtgccgagattgcagcctctgcccggctgccaccccgtctgggaagtgaggagcgtctctgcctggccgcccatcgtctgggatgtgaggagcccctctgcctggctgcccagtctggaaagtgaggagcgtctccgcccggccgccatcccacctaggaagtgaggagcacctcttcccggccgccatcacatctaggaagtgaggagcgtctctgcccggccgcccatcgtctgagatgtggggagcgcctctgccccgccgccccgtctgggatgtgaggagcacctctgcccggctgcgacccggtctgggaggtgaggagcatctctgcccggccgccccgtctgagaagtgaggagcccctccgcccggcagccgccccgtctgagaagtgaggagcctctccgcccgacagccacccagtctgggaagtgaggagcgtctccgcccggcagccaccccgtccgggagggaggtgggggggtcagcaccccgcccggccagccgccccgtccgggaggtgaggggcgcctctgcccggccgcccctactgggaagtgaggagcccctctgcccggccaccaccctgtctgggaggtgtgcccaacagctcattgagaacgggccaggatgacaatggcggttttgtggaatagaaaggcgggaaaggtggggaaaagattgagaaatcggatggttgccgtgtctgtgtagaaagaagtagacatgggagacttttcattttgttttgtactaagaaaacttcttctgctgtgggatcctgttgatctgtgaccttacccccaaccctgtgctctctgaaacatctgctgtgtccactcagggttaaatggattaagggcggtgcaagatgtgctttgttaaacagatgcttgaaggcagcatgctcgttaagagtcatcaccactccctaatctcaagtacccagggacacaaacactgcggaaggccgcagggtcctctgcctaggaaaaccagagacctttgttcacttgtttatctgctgaccttccctccactattgtcctatgaccctgccaaatccccctctgtgagaaacacccgagaattatcaataaaaaataaataaattaaaaaaaaaaaatacaaaattagccaggcgtggtggcgcatgcctgtaatcccagctactcgggaggctgaggtgggaggatcacttgaactcaggaagttcaaggttgcagtgagccaagatcgtaccactgcactccagcctgggcaacagagccagaccctgtctaaaaaaaagaaagaaaaaaaaagtacttttctcggtgtgttattcattcaggctggggcacacagacattaaacaaatccctgcccggagctgacatcctagtggaaggaacacagtaaacaaatgaatgtggccattatttaggcaggaccgaggagttaacgaggattcagttgttgggagcacttgcctcagttgcaaaacttaacagaacacgaaagagacttcagtcatcaacataaaaatatttcagcacaatgttttcaaaaagcaaagttgctgttagcctaatactgctctaaaaaaaaaatgtcagccacgcgtggtggctcatgcctgtaatcccagcactttgggaagcctaggcaggcggatcacaaggtcaagagatcaagaccatcctggccaacatggtgaaaccccgtctgtactaaaaatacaaaaattagctgggcgtagtggtgtgcgcctgtagtcccagctactcgggaggctgaggcaggagaattacttgaacccgggaggtggaggttgcagtgagctgagatcacgccactgcactccagcctgggtgacagagcaagactccatctcaaaaaaaaaaacaatacaaaacaaaccaaaaaaattgtttgtcttggttgggtgcactggctcatgcctgtaatcccagcactttggagttcaagatgggaggatcacttgagcccagcagtctgagaccagcctgggcaatagagtgagactccgactctacaaaaaaattctttaaaaattagctgagcaggccaggcgaggtggcttacacctgtaatccaagcatttctgggaggctgaggcgggtggatcacctgagttcaggagttcgagagcagcctggccaacatggcaaaaccccgtctcgatttaaaatagaaaaattagctgggtgtggtggcgcatgcctgtagttccagctactcaggcagctgaggcaggagaatcgcttgaacctgagaggtggagggtgcagtgagccgagatcatgccactacactccagcctgggcgacagagcaagactccatctcaaaaaaaaaaaaaaagccaggcgcggcagctcacacctgtaatcccagaactttgggaggccgaggcaggcgtatcacctgaggtcagttcaagaccagcctgaccaacatggtgaaaccctgtctctactaaaaatacaaaattagccaggcatggtggtacatgcctgtaatcccagctactcgggaagctgagagagaagaatcgcttgaacccaggaggcagaggttgcagtgagccaagattgtaccattgcactccagcctcagcaacaagagggaaactccctctcgaagaaaaaaaaaaaattagctgggcatggcagcacatgcctgtagtcccagctactcaggaggtcgacgtgggaagatcgcaggaggttgaggctgcattaagacaagattctgccactgcactccagcatgggtgacagagtgagaccccatctcaaaataaataaataaaagtcttttgggccaggcgtggtggcttatgcctacaatcctagcattttgggaggccgaggtgagtggatcgcctgaggtcaggagttccacagcagcctgaccaacatggagaaaccccgtctctactaaaaatacaaaattagccgggtgtggtggcgcatgcctgtaatcccagctactcgggagactggggcaggagaatggcttgaacccaggaggcggaggttgtcgtgagccgagatggcaccattgcactccagcctggacaacaagagcgaaactccatctcaaaaaaagagacttgtttaaaaaatcaaaattagtgcaaaaaaaccaaatccatgatgaacaaactatcaatattttaaataaagacgaatcagtaagagtgtcaagtgagtcacattggagcctgaggctaaaggagaaatcagttaagactgagcctggattctgggagtccagcaaggaggtaactacgatagtccaggagtgaaacggtggcggattagaccagagaaggacggtgatagtggaaagaacagggaattccaggtatcttgaaggtcaaggctacagaatttgttgaagatggcatgagactggggcagagagaaggtgcagatgacgccagggttgccgcatacgacagtgtgagtatctgattatcctttgtcttccccactttcctgtgaaacctacgagggcgggagctgtgcctcccaagccgcagccagcacccagcattcgctccagggctccaggccaactgccctggtggagaatgagctgtgttactccgcgcggccaccaggggtcagcagagcgccgccctgcccagccatggccatcccgggaagagtagaaagcccggatggcggctttttaggaagtaaggccggattagaaggagaagcagcagggactgaggaggaggcgggttctgagaaatggggctggaagcgaagtgtcccaggagctggccgagaagcaggggaatgagctactgtttctgtcactgcatccatccacccatttattccaccattcagtcacaggccactcagggccttgcagagccgggtgagaaactcagtgtgtcctgagggcactggggagacaagactgggtccgatttgcaggagctgagaggaggggaagaaagtagagattcaggacatgcaagctcacagccaacctgcctcccaggtgggcctgaagagcatgcaattaacataaatgttagcaaaacaaataatattggccgggcacggaggctcacacctgtaatcctagtgctttgggaggctgaggtgggaggattgctcgaggccaggagttcgagtctgcagtgagcgacgattgtgctacgcactccagtctgggagacagagcaagaccccatctctacaaaacatacaaaaagttaatcaggagtggtggcgcatacctgtggtcccagctacttaggaggctgacatgggaggatcacctgagtccgggaggtagaggctgcagtgagccgtaatcacatcactgcactccagcctcggtgaaagagtgagaccctgcataaaaaaaaaaaaatacaagtaatattaaattaataaaagctaacaatcattggacccttacgagatagcaggccttgttttaatcgcttttcaccatcaattttctttttctttttctttttctttttcttttttttttctgagactgagtcttgctctgtcacccagggtggagtgcagtggtatgattttggctcactgcaacctctgcctcccgggttcaagcgatcctccagcctcagcctcctgagatctgggattacaggcgcccgccaccatgcctggctaatttctgtaatttttttagtagagacaggtttcaccatgttgactaggctggtcttgaactcctgacctcaagtgatccacccgcctcagcctcccaaagtgctgggattacaggcgtgagccactgcaccaggcttgtgttttgtttttgagacagggtgttgctctgtctcccagggctggagttcagtggcacaatcacagctcactgcagcctcaatctcctgggatcaagggaccctcctgcctcagcctcctgagtagctgggactacaggggtgcaccaccacactcagctaatttttgtatttttttgtagagagggtttcaccatgctgcccaggctggtctcgatctcctgggctcaagtaatcctccctccttggcctccaaagtgttcggactacaggcatgcaccacctcacccctcacccagcccttttcttcttttttttttttttttttttttttgagatggagtcttgctctgttgcccaggctggagtgcagtggcctaatctcagctcactgcaagctctgcctcccaggttcacgccattctcctgcctcagcctcccgagtagctgggactacaggcacatgcccggctaatttttttgtattttaagtagagacggggtttcaccgtgttagccaggatggtctcgatctcctgacctcatgatccgcctgcctcagcctcccaaagtgctgggattacaagcatgagccaccacacccaaccttctttttttttttttttttgagacaagagtctggctctgttgcccaggctggagtgcagtggcgcgatctcggctcactgcaacctctgtctctggggttcaagcgattcttctgcctcagcctcccaagtagctgggattacaaatgtgtggcaccatgtccagctaatttttgtatttttagtagagatggggttttgccatgttggccaggctggttttttgtttttttgttttgttttgttttgttttgtttgagacggagttttgctcttgttgccccagactggagtgcaatggcaccatctcagctcaggctcaccgcaacctccgctcctgggttcaagcaattctcctgcctcagcctcccaagtacctgggattacaggcatgagccaccacacctggttaattttgtatttttagtagagatggggtttctccatgttggtcaggctggtctcgaactcccgacctcaggtgatctgcccgcctcggcctcccaaagtgctggaattacaggtgtgagccaccatacctggccgataaatatttgttgaatgaattcattgaatgctgacagcaactccacgaggaatgccttggggcttgttttcctattatttatctgtgaataagcactctattgagattgttcccacgccatacattttacacgtttaaagttgtgtttagcagagttaggggttttttagtgtattcacagacgcgcaaccatcaccacagtccattttagaacattttcatcacccaaaaagcaagcatgcagccattagcagtcactctccattccccggtattagtttgctgggactgccaaaaccaaggaccgcaaactgggcggcttgaaacaacagaagtgtcttctctcgcagttgccagaggctggaagtccgagatcaatcagggtgtcggcagggctggttgcttttttttttttttttttttttaatttgagatggagtctcactctgctgcccaggctggagtgcagtgatttaatctcggctcactacaacctccacctcccaggttcaagcaattctcctgcctcagcctcctgagtagctgagattacaggtgtgagccaccacgcctggctaatttttgtatttttaggagagacagtgtttcccagtattggcgaggctggtcttgaattcttgacctcaagtgatccgcccaccttggcctcccaagctgctgggattacaggcttgagccaccgtgcccagcctctttctgaggctgtgaaagagaatcagtcagtctgtaatcctagcactttgggaggctgaggcagacagatcatgaggtcaggagtttgagaccagcctgactaacatggtgaaaacccgtctctactaaaaatacaaaaattagccgggcatggtggtgcatgcctgtaatctcaactgctcgagaggctgaggcaggagaatcacttgaaccctggaggcagaggttgcagtgagccgagatcgtgccactgcgctccagcctaggcaacagagtaagactctgtctcgaaaaattaaattaaattaaattaaattaaaattaaaataataattataagcccattacaggccaacataaatattttatgaaaaatatattttccaattaaaaaaaaagttagtgaagggagtggcattcttttacatttttgcaaatctctttaacgtccagcttttatagaagatggctggaccttgggctgggcactgtgcttacgcctgtgatcccagcactttgggaggctgaggtgggaagactgcttgaggccaagagttcaagacaagcctgggcaacatagcaagacctcaaaaaaaaaagaaagaaaaagaaagaaagaaaagaaaagaaaaggaaagagagagagaaagaaagaaagaaagaaagaaagaaagaaagaaagaaagaaagaaagaaagaaagagaaagaaaaagaaagaaagaaagaagggaaggaaggaaggaataacagtaagaagaagatggctgggcctcacggctgcttctgcatttggtctgttgtgatatcacacatcacacagcatctggaaatctccaccagacaacagaatgaagtgaaaaaggcagaaaatgtctcggtatgaaaatttgacccagcacaccgaagagaccagttctcaggtcacattgagaccttctaaaataaacttattttatcttcactatgatgctatgaggtgggtactagaattaaaatatcctcattctacaagggagaaaacgaaggcccagagaggtgaagttacttgcccagagtcatacagcagtaaatggcagagctgaggtttcaacaccaccaattactcttaacctcacaaaatccatgtgtaggccaggcatggtggctcacgcctgtaatcccagcactttgggaggctgaggcgggcaggtcacaatgaggtcaggagtttgagaccagcctgaccaacatggtgaaaccccatctctactaaaaatacaaaaattagccaggcgtagtggtgcgcacctgtaatcccacctactcaggagactgaggcaggagaatcgcttgaacctgggaagtggaggttgcagtgagccgagatcctgccactgcactccagcctgggtgagaaagcgagactccatctcaaaaaaaaaaaaaaaatccgtgtgtatgtgcaatcataaataaatacaggccaggctgggcgacctggctcacgccataatcccagcacattgggaggctgaggcaggaggattgcttgaagccaggagttcaagaccagcctgggcaacatagcaagaccctctctctacaaaactttttttttttttttgagacggagtctcgctctgtctgccaggctggagtatagtggcgtgatctcagctcactgcaacctccgcctcccaggttcaagcgattctccagcctcagcctcctgagtagctgggactacaggtgcacgccactgtgtccagctaatttttgtatttttagtagagatggggtttcaccatgttggccaggctggtcttgaactcctgacgtcaggtgatccacccgcctcagcctcccaaagtgctgggattacaggcatgagccactgcgcccggccaacaaaacatttttaaaaaatagctgggtggggtggtgcatacctgtagtcccagccacttaggaggctaggtgggagaatctcttgagcctgggagttcaaggctgcagtgagtagtgatcatgcagcctgggtgacagagcgagaagactgtgtctcaaaaataattaattaattaattaatggcacaagtgtacctctcatggctggcatagcacctgcccaggctgcacagccaggaagtgctgtcaggagacaggagcccatgatctgagcttgattccttgccctgaaactctagcaagtctctctggggataaataaggatctgttgtctgagaggccactatcaccaggctatatcacttccccatgtctcggtttccctagttgtaaaatgcatctagtaacagagcccatctcagaatcttgctataaaataaagtattagcaaaaaacaagcactcccttaagtgttaactatgaggatcatgaatgagtttgtgtgttgtgagcaaatgcacacgggtgtttgtgtgtgcctcagtttccccatctgcccaaccaaaggccagcgcgtgctccctgcaagcccctgactgtatgcctcttctaagactccctgctccattttctttttcttttcttttctttcgaaatggactctccttctctgacccgggctggagcgcagtggcgggatctcggctcactgcaacctccgcctcccaggttcaagggattttcctgcctcagcctcccgagtagctgggattacaggcgcccaccaccacacccggctaatttttgtatttttagtagagacagggtttcactatgttggccaggctggccttgaactcctgacctcgggtgatccaaccgccctggcctcccaaggtgctgggattataggtgtaagccaccgcgcccggccccagctccattttctttccccatgttaaggtcatgtagaggcttttaagtgcctggagacccccatgccagggaggaccctgagaacgggaagtgggggctgcatggagagaaggagctaggggaactgtaggacctcctatcagactggggaaggcctggcttggacgcctgggttcccgtcctctgtgcgaggtactacaacccctgagttcccatttatgatctaatggggagcttggatgtaagggttcccgtccctgcggcgggggatggagataagacgccaggatcctggtctctggagctccttagagagctggatcctggtccctgacgagggaggtgtatgtcccccttttaaggcgggttgggtttggatgcgaagtcccagccctgtggggggagagtgtgctgacactcaggagttctctcccggaaagggagggtctcgaattctggatttgtgtccctggaggaagcactgacgtgagtcttcactcgtacatggggctcggctgcagggtacctgtcttgtcccgaggggctgctggggcactaactgcctcctgaaggggtgtagacagtgcccggactccgctgttccccttttggagtggggtagctccgatccgaggtgctacattctgacccccgacgttaccgtggggcaagggaactcggaccccagggtagcttggccccctaccagggaaaggcgagcagggcgggtccgggggcggagacgcggcgggcggggctccggcagaccccgcccccgcccgcagcgctggtcgcgcgtctccaagtctgcgaggccgaggtgggcgccgagagctgggcgccacagcccgcgcgtcccgctgcgccccgcgcgccccggggtctatggagctgcccctccgcgccgcccggccggccccacgccgcgcccggagcctgctctgcggccaagtaatcggactggcggtcctgcgggtaggggaagcttgcgggctggcaggagggggacttctgggtcccagaggaatggggggctggaactccagtgtcctgggggatagggggtgggacgagggtatcccgagcctgggggaaggggcgcacggatgtttgagtcctggagaaatctggggttgggagacctggacacgggggtctggggcatctggacacctggctgggaggtttgggggcggcctggttcctggggttagggggtgttctgaacgcctggtcctggaggaatgaagacctaactgaaaacgttaggggatcaggagaccaggacacctgggccccgagtgtcgggtcaatcctgggggcgtcctggggcagaggctgcggcggctgcgtccggggctggggctcgcgcgccggggtcttcagggaggaagttgtggtcgtggggatgtggcggtccgaacacgtggcgccatcccgagaggctggggggatccctgggcaggacacaggatgggggtccctgccctctgccccctgcctccttagcccagccgggaaaacagggtgcagatccggggagtcagacaccggggatgggcttggggggcgggtcctcggggcagagggctccgggggctggggcgtgcgtgcctggcccgggaggcgcccgccccccgcccggcttgggcatgcttggcacgcagcgcgcgggccggttcgatccgtatgcgcgccgcgtgcgcccattggtatgcgggagccggcccggcgcgggcgtgaggcgggcgcgctggcgggcggcgcgggggaggcggcggcggggcacgtcctcacccggagcgccagccccgggccggctagggtgggagctgaggcctccaggtaggggaaactgaggcatcatccaggcccccccccccccagctccttgctgggaccctgagccctgcacggatctcagtttccctagaaggtctcccgagggcactaagcgttgcccctggccccctcccgctgcaggagactcggggctcggagcccgcctgagcgagccccccggagatggcggccccctatcccggcagtggcggcggaagcgaggtcaaatgcgtgggaggccgcggcgccagcgtcccctgggactttctacccgggctgatggtcaaggcgccgtccggaccgtggtgagcaaagccccgcccccctggccgcgggcccccccccgggtccaattcacacccgatgttctgtccccgtgccaaggggcagttcacacccagctccctgacccgccccttagggctagaaggtcttaccttgagttaactaccgtcctgagcccggtcccctgcgttctgcttctagtcccggtcctcagaattcacgcccaacatctttaatctctcgcccttcctcctccttcccaccagaattgacactcgaggttctgtccctgggtcggagtgtaaaatccacactccggtctgctcccacctccagagatgtggaatccactcccaacgtcccgtcccgttcccaaggccccgggaggcggggctcgcccccagttcccaagcccctgagccccggggccccgccgacacctcctccgcgccgcccgcccagcctgcaggcgcagcgcaaggagaagtcccggaacgcggcgcgctcgcggcgcgggaaggagaacctggagttcttcgagctggccaagcttctcccgctgcccggcgccatctccagccagctggacaaggcttccatcgtgcgcctcagcgtcacctacctccgcctgcgccggttcgccgcgctgggggcgccgccctgggggctgagagccgcggggccgccagctggcctcggtgagtgctcatgcgcggggcgagggtcccggggccctccaggcggagtcactgcagcccagatccgggctgcgggcctgccctcgcccagatgcttgtctctggagtcagccaggacctttgcgtgtccctatcaggtggcttctgctctccaagcctcagtttattaaactgtcaaatgggcgcaagaggttgggaagatttcgtgaattctgccctaaacaaggccctggcagttctagtggtcactggtaaatgctattcctatatttttattagaggagaggaatcattattacaaccaaagaaactcccagctgcatgagcgggacagaggggactcaccctggcttgggacgcccattcgctaatgggcgagataccctggatccagacctgaggggccccggcgggaacgcaaggactgtacagtctgagcccccagttggaggagcaagagggagacagtatgatgtggcggatgagatggggaacttcaggaagatgccccagggttcctgtcgccgcgcagccacctcccagctttgcaaccccgggcaggtcgcctcacttctctgtgccttaatgtgaagtgggaaaaaacggtccaacctcccccagggggctgagcagagaatcaaccaggtcatatttgcaaagtccctggaagtgcctagctcagagcaagccaccgctatgcggccaatgctgttatcagcagtaaccttgcagggctgctggaggggttcggggcatggaggagggggcgggggggctgtcgcttttggagcatctcctgcctgtctggcacttttctgagcgctgggattgagcaggagaaacaatctagacaaaagtccctgccccggagcggctggcatcctagtggccaagacgcaataaagaaataggcaaagcaatataatctagaatatgtaaaaatataaactctgtaagatacagataaatatctaagtttattattattactcagactttattattgagacatagaagtgctgttatgttattattacttctattttatgtgtttgttacagctttgcggtgatgaggataaggcagtgtgagtggtgtttatctgaagtctcagggcaccccaggctacccctgtccccacccctccaggagaagagggtgtccttagggtggggttggaggggctccaattcccctcctgccccgtcccaggggaagaggggggagagaaaatagcattgattaagctcgcaataaatcaccatttaaatttaaataatccggcttcccaggcggtaattaggcgaattgactggcgcggagagaatgcggcattagcgccgctgattactgtcattaccgcgaacaacatgtgcgccggcgggggataaacatcttgtctattgtccccgagctgaagggggggaaagggggggctaagagagccccggcggcgtccagccccccattacctggatgagcattccggggctcagaggcatcaggggctggctgaggtcacagcactgacgtggcagagcatggacttaatcgatcccacctcgaccacggtgccaagtggaagtagggtcaggacagtgtgggggggcttggtactgcgtggactcctatagtcccaaaactgggaaatcgggggacagaggcatttctagctctacagggtccctaacaagaggcgaagcacctgcttccatagttcagaggaggagctgaggacagcattttagctgaagccacagagcagagcactgtcagtcacactctctgaaggggaggggactcccatgccctcctcagtaataagccgggcaccatggctcacatccgtaatcccagcactttggggcgccaaggtgggaggaaagctttgggccaggagttcgagaccagccagggcaacatagcaaaaccctgggcaatataacaaaaccatgtccctacaaaaataaaaatattggctgggcacggtggctcacacctgtaatcccagcactttgggaggccaaggcgggcagatcacgaggtcaggagttcgagaccatcctggccaacatggtaaaatcccatctctactaaaatacaaaaaattagccgggcgtggtggtgtgtgcctgtagtcccagctactccggaggctaaggcaggggaatcacttgaacccaggaggcggagattgcagtgagccgagatcacaccactgcactccagactagtgacagagcaagactccatctcaaaaaatatataaaaataaaaataaataaataaattagccaggtttggtggcacccgcctgtagtccctgatactgaacaggatgaggtgggaggactgcttgagctgaggaggtcgaggctgcagtgagccatgatcatgccactacactccagcctgggcaacagagcaagactcagtatctaaaataataacaataatagtaatcatatagaatgcatgcatcagaccctgggataagccctgtatacaaaatgactttcttggccgggtgcggtggctcacgcctgtaatctcagctctcagggaggcaagaggcgggaggatagcttgagcccaggagttcgagacctgcctcggcaatatagcgagaccccgttctccagaaaaaggaaaaacaacaacaacaacaaaagataaaatgactttctttttcagagggaggcactattatgattcccaagttacagaagtgtgtgcccaaggtcgcacagctgggattcaaacacagatgaccttgccccaaaggccgcctctcaaccatcatatgtggtctgtaggtctacagggatgggttctaggtctctgcctctctgggcctcagtcctccatctgtgaaatgggacaacagatgttcaagtctagccctgagcctctgagtctggagaggagaccgcccaaatctcatgtcagcattccctattgctttttttttttttttttgaaacgcagttttgctcttgttgcccaggctggagtgcagtgttgcaatctctgctcactgcaatctccgcctcctgggttcaagcaattctcctgactcagcctcccgagtagctgggattacaggcgcctgccaccgcgcctggctaattttttgtatttttagtagagatggggtttcaccatgttggccaggctggtctcgaactcctgacctccttatcctcccaaagtgctgggattgcaggcgtgaggcgccgtgcccggcttttacagccttctttcttcccatagcacttattgtcatctgacactctctgtatttatcttgttattttgtgtcattcaccaacagcctcttggttgctgagcctggagtagcatctgggacacaatgaaggcttactaaattgttgagtgactgtggcagttgagggaaggaggggtgacatctttatttatttatttatagacggagttttgctcttgttgcccaggctggagtgcaatggcatgatctcggctcactgcaacctccttctcctgggttcaagcgattctcctgcttcagcctccctaatagctgggattacaggcatgcgccaccacgcccagctaattttgtatttttagtagagatggggtttctccatgttggtcaggctggtctcaaactcctgacctcaggtgatccgcctgccgcagcctcccaaagtgctgggattacaggtgtgagccaccgcacccagccctttttaaatttttttgaaacagggtcttgctctgtcgcccaggctggaatgcagtggtgcgatcttggctcactgcagcctccacctactaggctcaagagttcctctcacttcagccttccaagtagccaggactacaggcacacgccaccacgcctagctactttttgcattttttaagagacgaggtctcaccatgttgcccaggctgctctcacattcctgggatcaagtgatttgccaaccttggcctcccaaagtgttgggattacaggtatgagccactgtgcccagccaaggggtgacttcttagctcataggtcaggcacatcctcgctgaggaagtaacgtttttttgtttttgttttttgttttttttgagacagagtcttgctctgtcacccaggctggagtgcagtggtgcgatctcagctcactgcaacctccacttcccaggttcaagcgattctcctgcctcagcctcccaagtagctgggttacaagcacacgccaccatgcccagctaatttttgtatttttagtagagacagggtttcgccacgttggccaggctggtcttgaactcctgacctcaggtgatccatccacctcagcctcccaaagtgctggggttacaggtgtaagccactgggcccagccaaggaagtgatctttgagctgaggctccaaggaggtgtgggagcagctgtgagaaaagctggaagagagtgactcagcagagggaacagcaggtgcaaaggccctgaggcaggtggggatcagcttgctgggtgcagagcctcatgcactgtggtaggggtttggctgttacccacagtgagaggggagccacagaggtggtgagggcggaagtaggagcccagtgaggatgaggacgtggtggtccagccagggcagctagactgggctggggccatgggtggtggaacacaggtgacatggtcaggtccaacccctgggacttgcttaaaatgcatgtgggtgtgagagacacagagggcggcctccaagaaaccgcccgaaaaggcagtggtgccctgatgttatctgtagtcatactgaaaagaaaagtgcggccggggcggtggctcacacctgtaatcccagcactttgtgaggccgaggcaggtggatcacctgaggtcaggagttcaagacaagcctgaccaatatggtgaaaccccgtctcaactaaaaatacaaaaattagccgggcatggtggtggtgcctgtactcccagctacttgggaggatgaggcaggaaaatcacgtgaaccaggaggcagaggttgcggtgagctgagatcctgccactgcactctagcctgggtgtcagtgctagatgccgtctcaaaaaaaaaaaaaagagagagagagaatggtggcatgactcccagtattaggcacctactgtatgcactagcccattcaactctatcactgtagacccattttacagatgaggctgaggaaagtaaaggcaaaggtgacccggcactgccccaccccatggtgcttgcccccatgcagccctcaggcctgcggcgctttgacgatggggcatgtgagggacccctctccccgacttccctgggtgatgaagccccagcctcttctctccaggacccagggtcagcacattccttcagggcagttgagaagggcaggtgacgggggagatctgggaacttggaagaggccttggcttctgccttctgcccctggatccccctctctctgccccaggtcccccctctctctgccccaggtccccccacactctgcacccggtttccccctctctctgccccctgggtccccctctctctgcgcctggtctcccttctctctgcccctggtctcccgtctctctgcccctggtctcccgtctctctgcccctggtctcccatctctctgcccctgttctcccttctctctgcccctggtctcctgtctgtctgcccctggtctcccttctctctgcccctggtctcccgtctctctgcccctggtctcccgtctctctgcccctggtctcccgtctgtctgcccctggtctcccttctctctgcccctggtctcctgtctgtctgcccctggtccccttctctctgcccctggtctcccgtctctctgctcctcgtgctccctctctgcgcaagagatgaggacactgagcaggctgtgataagaaccacagcaagtgtttgttaaatggatgagtgatgtttgggttctggacatgggagggcggatgtggaagtggtgaaaagtctcctgctgaatgtgggggacagaggagtggggacattttgaggggagagggagaggaggaaacagcgggaggcatcggggagttggtgggatcgggaggtggaggctgggggtaaaaagacacatcagtcagtgatcaggagactctgggggtccctttcacaggggaccggacccgtgtatggggaagagcaggtccccaagcccccccaccaccacaccccctaatcccgacgtgcccattaatgttgttaattgcagcggttcagtctgacccaggctgatcctgggagagggaaaatgaaggaattagcaaaaatgacaggggaaaattgcgacaattagcaggcagcattgttcctgcctgtcacccggctggttccgagctgtatcttgagggagggggtccccgtcaaccccccagccccccagtaattgttcctggagctccaggcggaggtggaggcagggaggaacagccaggagggtgtggggtactcctgggaggaggaagctcagcccagacactagggggctggggaggcgggggctgcgcgcccatgggggaggggcggggtttcgccgcctggtgttttgatggtcgggtaataacaatagtaatcacactattaataccagtcccggctctgtgctgcagcatctgcttctgccaggccccagccaggcccttctgtctgttaagtggactgaatgcgtaaccagcctggggagtcaccgctcctggcaaacccgcttgacagaggaggaaactgaggcacagagcggcagagaggctggtcccagggcacacagccagggaggggaagcgctggggcctgacaggagacctggccccttagccccataggaaaaaggcacttggggaccctcaaggtcaccaagtctctcccctggctccccactctcagcactgggttggagctccctcgggggttgtcctctgcagggtcagggtcacccaggggtcctgggtggggacaggctccgggacccccaggtctctgcctacccccagcacaaggtccagggtcctagctcctgactgtagggaggatggggcagggggcacaggtctcactttgtcttggtctcagttgccatctctgtctctctctgcatctcttttcctctgtctctccatgtctatttttttttttagtttttgtttgtttgtttgtttttgtttttatttttgtttttttgagatggagtcttgctcttgctgcccaggctggagtgcaatggcacaatctcggctcactgcaacctctgcctcccgggttcaagtgattctcctgcctcagcctccagagtagctgggactacaggtgcacaccaccacgcccggctagtttttctgtagttttagtagagacagggtttcactatgttggccaggaaggtctcgaactcctgacctcaggtgatctgcccacctcagcctctcaaagtgctgagattataggcgtgagccactgcacccggccttagtatttttatttattattattattattattgagatgcagtttcactcttgttgcccaggctggagtgcagtggtgggatctcagctcactgcaacctccacgtcccgggttcaagcaattctccctcctcagcctcccgaatagctgggaccacaggcacatgctaccacacccagctaattttttgtatttttggtagagacaaagtttcaccatgttggccaggctggtcttgaactcctggcctcaggtgatccacccacctccgcctcccaaagcactgagattacaggtgtgagccacagtgcccggcctccccattttatttactcattcatgagttggacatttgtgtgctttccaccttttgaatgatgtgaagtatgctgctatgaacacgcatgtacatgctacaacgcctgttttcaattcttttgattacatagattacatacacagaagtggatttgctaactcgtatgataattccatgttaacttattgagaaaccgtcaaattgttttccacagtggctgtacaattttacattcccaccagcaatgtatgagggttccaatttcaccacatccttaccaacacttactttctgtgttttttgttttgttttgtttttgtttttgtttgtttgttttttgagatggagtctcgctctgtcacccaggatggagtgcagtggtgtgatctcagctcactgcaagctccacctcctgggttcaagggattctcctgcctcagccgcctaagtagctgggattataggtgcacgccaccacgcccagctaatttttatatttttagtagagataagatttcaccatgttggccaggctggtctcaaactcctgaccttgtgatccacccgcctcggcctcccaaagtgctgggattacaggcatgagccacggcgcctggccactttctacttttttgatgctagccatcctagcgggtgtggagtggtgtctcatagtggttttgattttcattttcctagtgactaatgatgttgggcatcttttcatgtgcttattggccatttgtgtatcttctttggagaagtatctattcaagtcctttgcccatttttaaaaatatattttttgtagagatgggggtctcactgcattgcccaggctggtcttgatctcttgggttcaagcaatcctcccacctcagcctcccaaagtgctgagatcacaggtatgagccaccgtgcctggccctttgcctttttttttttttttttttttttttttttttgtctgagacagagtctcactctgtcgcccaggctgcaatgcaatggccctaactcagctcactgcaacctctgcctctgggttcaagcgatttatcctgcctcagcctcccgagtagctggaattataggcacccgccatcatgcccagctaatttttgtagagatggggtttcataatgttggctggtctcgaactcctgacctcaggtgatccacccaccttggcctcccagagtgttgggattacaggcgtgagccaccacactgggcccctttgcccatttttgaattgtctttttgttgttgagttgtagaatctctatctctttctattcctttatatccctctgtctctgtctttcagtctcctctctgcctccttctcatccttcaggtctgctcaaatgtcccctccttcaacagccctaactccattactctccattttgcaccacctatttcattctccatagcactggccacaaagggtaattccatatttgttagtttctttgtgtgtgtgtgttttttttttttttttttttaaacagacggagtctcactttgttgcccaggctgcagtgcagtggcgcgatcttgactcactgcaacctccgcttcccaggttcaagcgatcctcctacctagcctcctaaatagctggaattacaggcccacgccaccatgcccagctaatttttttgtgtttttagtagggacggtttcaccatgttgcccaggctggtctcaaactcctgacctcaagtgatctaccctcctcggcctcccaaagtgcttggattataggcatgagccacctcgcccagcctgttggtttcttttctttctctcttttttctttctttctttttttttttttgagatggagtctcgcactgtcatccaggctggagtgcagtggcatgatctcggctcactgcaacctctgcctcccggtttcaagcgattctcctgcctcaacctcccgagtagccaggactacaggcgcccacctccacacccggctaatttttgtattttcagtagagatggggatccaacatattggccaggctggtctcgaacccctgaccttgtgatctgcctgcctcagcctcccaaagtgctgggattacaggtgtgagccacctcgcccagcctgttggtttcttatttatttatttttatgggatccctaagcagagatgttagtttcttgcttgctgttcaactgcccctggtctgagagcccagcaggaggcaggggttgctgggctgtcctggtcaccgttgcactcccagcaatgcctagtgcaggacatagggagggtaggtattcagggagcttttgtgagtgaatgggtggatgaatgaatgagtccctctatgcaccccctggcccgtctgtctctgtgagtcagtctgtcactcactgtcccacccacctgtgtgtcccacgccccaggtctctcccccatgggtgcccagataccccaagatgtctacaagccttaggggaagagagggaggtttgtagactggctcccgggggacctgccctgggcagggtcagccagactaacaggcttcatccttccatctgccccagccccaggccgccgcggccccgcagcgctggtctccgaagtcttcgagcagcacctgggaggtcacatcttgcaggtgagtgaggccccttccctgcctgccgctccttgctaccacctagcggccgcctctggagaacagcagcctcttcagcatccatctattgtggggggtacctggactgggaaggcgaatgctcaagatccctccactccctgccccttccgaggaccactgaagccccctccccaccaaaacagtccacctcaggtggagacccaggtttcagaacctcttaccacttggcggctggacagagggacaccgggtcctctccttccccctccctgtctctcccggctctagtccctggatggctttgtgttcgccttgaaccaggaaggaaaattcctctacatctcagagacagtctccatctatctgggtctctcacaggtaagggacccccagtggacctggattggctcagccaccatctcccttgccaggcctatgcatatccttcctctctcctggtctcaccatagcagcaagaaaaatggactggatctctgtggtccccaaagtgtgttccttggcaccccacatggcacccagcatggttcatccttgaaggcagaggagggctattgttttttgtttgtttgtttgtttgtttttgagacggagtctcgctctatcacccaggctggagtgcagtggtgcgatcttcgctcagtgcaacctccacctcccgggttcaaacaattctcctgcctcagcctcctgagtagctgggactacaggcgcccaccacacccggctaactttttgtatttttagtaaagatggggtttcaccatgttagccaggatggttgagatctcctgacctcgtgatccacctgcctcggcctcccaaagtgctaggattacagtgtgagccactgtcctggctgatgagggctatttttttttttttgagttggagtttccctcttgttgcccaggctggagtgcaatggtacgatctcagctcactgcaacctctgcctcctgggttcaagcgattctcctgcctcagcctcccgagtagctgggattacagacatgcaccaccacgcctagctaactttgtattttttaaatagagacagggtttcttcatgttggtcaggcttgtcttgaactctcaatctcaggcaatccgcctgcctcagcctcccaaagtgctgggattacagcgtgagccaccgcgcccagcctgagggggctattaaagtaacaagtagatctgaggaaagcaggttcactgaaagatcagtttgccaatgactggcgggccagatgcaccatatttgccaacacttgtttcttcttaacaattttaaaggtttagaggccacccacgctggctcatgcctgtaatcccaacactttgggaggctgagccaggaggatcacctgaggccaggaattcaaaaccagcctgggcaacatagtgagacaccccaccacccccacccccaccatctctacaaaaaaacttaaaaattagccaggcatggtggcacactgttgtcccagctactcaggaggttgagatgggaggatcgcttgagcccatagggtcaaggtggcagtgagccatgatgaagccactgcactccaacatggacaacaaagtgaggctatgccttaaaaaaaaaaaaaaaaaaaaaaaaaaaaaaaaaaaaaaaaaaaaaagggccgggcgcggtggctcacgcctgtaatcccagcactttgggaggccgaggcaggcaaatcacctgaggttgggaattcaagaccagcctgaccaacatggagaaaccccgtctctctactaaaaaacaaaaaatacaaaattagccaggcgtggtggcagacacctgtaatcccagctactcgggaggctgaggcaagataatcacttgaacccaggaagtggagggtacagtgagccgagatcgtggcattgcactccagcctgggcaacaagagcaaaactccgtctcaaaaaaaaaaaaaaaaaaagggcaggaagacctactgaaagccccatccttggagccctggcatctcacagcaccttaagctttgccagtccctccaatacaaattgctatcaactttgatcatttttacaaatatttttcacaaataggaaatttaggaaattcagtgcattggcaacttgtgagtaccttttcagtgagattcctggaggaggaagacaccaaaaggaggggaatttggacaagaggacgggagggaggaagagtggaggaaaagcttggccaggtgtggtggctcacgcctgtaatcccagcactttgggaggcaaaagcaggcagatcacctgaggtcaggagttcgagaccaacctgggcaacatggcgaaacccagtctctactaaaaatacaaaattagccgggtgtgctggcagatgcctatagtcccagctactccagaggctgaggcagaagaatcacttgaacccaggaggcagaggttgcagtgagccaagattgcaccattgcactccagcctgggcaacgagagcaaaaccccatctcaaaaacaaaacaaaacaaaaaaagtccaggcgcggtggctcatgcccgtaaacccagcactttgggaggctgaggcgggcagatcacctgaggtcgggagtttgagaccagcctgaccaacatggagaaaccccgtctgtactaaaaatacaaaattagccaggtgtgttggcacatgcctgtaatcccagcttcttgggaggccgaggcgggagaattgcttgaacctgggaggcagaggtcacggtgagccgagatcgcgccattgcactccagcctgggcaacaagagcaaaactccgtctaaaaaaataaaaagaagaagaagaagaagaagaagaagaaggaaaggcttgaagctgttgaagctggcgtgggggaggatttaatgagggggcggagcccagagggataacggactgagggaagcatgtgacctccaagctgaggggcaatgggagtcatggcagccatggtggtcaggtaagtaacttgcagaggcatctttgaactgtaggtcagaagaccagtgaggacgcgggggcagaaacacagtggggagaagatgggggcctgcattgagggaggcagggagagaaggggactgctaggagagagatttacgggtagaattgaatgtaaaagtgtctgattgaaaagctctaactctttaagagcttaaaaaccactcccctgtttgtatcttgaatctcattcctgctgggacacccagtgattcatgccagggcacagttgtttgctgtatgggggtggtagtgagtaagcaggagttgggtaaacggaggttctgacacctcccacccacgccccactcccacacacagccccttaatagagtgggcggggaaaaatccttactaatcactgggtatgaagcgagaagagtctaagtttgtatcttccgtttgaaaggtaattgttttttgtttttttcttttcttaaaaaaacacactggcatgaagcgcacctgcgtgcaggcaaatgaggcaaggctgagcccagagggcgagcgagttactgcgcgcgcacctcacccgccccctgcattcccctccttcgccggcaggtggagatgacgggcagcagcgtcttcgactacattcaccctggggaccactcagaggtgctggagcaactggggctgcggacgccgacgcccggccccccaaccccgccctccgtctcctcttcctcctcctcttcctcttcgcttgcagatacccccgagatcggtaattctaagggctcctaaagaatgaagtctgagggtagatcgggggacgcccgctgtactgtatccagccatgccgcgtttatacaaatagcagtgaagttagaactgtgtagaacgaatctttgcaaaaggaatcggagtataaattgaggcggtgagacttggttccttaagcttgccaaactcccaaagattcgagctacagaaagacccccctggctgctgaaaggagttgggagaggcttaggtaaataacaaggcaggcttattgggaatatacaccggctgtgtctgtaagtgcacaatcacattacataattacgttagggccgggcgcggcggctcgcgcctgtaaccccggcacttcgggaggcccaggggggcggatcacttgagctcggttggagaccagcctgggcaacatagtgaaacctcatctctacaaaaattacaaaaaaggccaggagtggtggcacaaagctgtagccccagcactttgggaggccgaggcgggtgggtcacctaaagtcaggagtttgagaccagcctggcttgcatagtgaaaccccatctctactaaaaatacaaaaaaaaaaaaaaaattagctgggtatggtggggggtgcctgagtcccagctactcgggaggctgaggcagaaggatcacttgaacccaggagatggatgttgcagtgagcagagattgtgccactgcactccagcctgggcgagtccaagactgtctccaaaaaaaacaacaacaacaaaagaaagaaaaaaacattagctgggcatgatgacacatgccagtggtcccagctacttgggaggtgggaggatggcttgagccttggggacagaggttgcagtgaggagatcacgttgctgcactccagcccgggtgacagagccagtgtctggaaaaaaaaaaaaaaaaaggctgggtgcggtggctcacgcctgtaatcccagcactttgggaggccgaagtgggcggatcacctgaggtcgggagttcgagaccagcctggccagcatggtgaaaccccatctctactaaaaatacaaaaattagccgggcgtggtgcaggtgcctgtgatcccagatactcaggatgctgaggcaggagaatcgcttgaacctgggaggtggaggttgcactgagccgagatcaggccattgcactctgagtgagactccgtctccaaaaaaaaaaaaaaaaaaaaaaaaaaaaaattgcattagatcctaagcgcaggcccacaatgcaagaagtgttatctccattttacatcagaaaactgaggcacggcgcggagaggttaagttaattgcccccaggtcacacagctataagtgattgagttggattctagcccaggtctgtctgttccggggtcagcacgcctaacccttctctccagtggaaatttccactcccactgtgtatgggagggagggtgctgcagattaccctgccggctctttttagctctgagatgttgggggcctatgaggctaactatcctgtaaataggattttccaatcttgggtttgcttaacaccaaaaacatctgagacatcagctgtgcttgcaagcgtggggcgaagtctgcaacacgtgcaggctgttggggagtgggactgtgtttgtacctgagttttaggcacagggtcatctgtgtgtgagcatatttttaagaccgttttgtaggggttacagaaggatctggatttgtgagtcttatttattgctattccccaatcccctgttctgggccagcccctgtcctggtgacataggagtgaccatgacagctccagccccacccacctggggctcccagtccagtgaggggagaccaacctgtcctcagacagtggcaacccagatggggcagggctgggataggggaacccagaggggatggctgacccagcctgagggtcagggagggcttcttggaggaggagaagtctgtgctgagacctggaggatgggtcctgagaggtgggctttcctctcaaggcctcaggaagctatggcaggttcagagcaggggagggtggaggcacgtttgagcattagaaagacgtagatggggccaggcgcagtggctcacgcctgtaatcccagcactttgggaggccgaggcggccagatcacgaggtcaagagattgagaccatcctggccaacatggcgataccccgtctctactaaaaatacaaaaactagctgggcatgatggcgcgtgcctgtaattccagctactcaggaagctgaggcaggagaatcacttgaactggggagacggaggtcgcagtaggccgagatcgtgccactgcactctagcctggtgacagagcgagactccagctcaaaaaaaaaaaaaaaaaagacatggatgggaccagacatggtggctcacacatgtaatcgtagcaccttgggaggccaaggagggcagatcccttgaagtcaggagttcaaaaccagcctggccaacatggcaaaaccccgtctctactaaaaatacaaaaattagtcgggcatggtagcatgtgcctgtaatcccagctacttgggaggctgaggcagaagaatcacttgaacccaggaggcggaggttgcagtgagccaagattgcgccattcactccagcctggacaacagagtgatattcagtctcaaaaaaaaaaagaaaggatgcggatggctgccacataggggagcccacatactgtccccatgagctttcaaaatcatcaggcatgcctctgagtgcggccgtggcccagcggacatcttgtgtctatgtccggctggctctgcaagggtcagggtggcctgtgtgtttcctcttcaggaccccataaccttccttcactctctgtcccagaggccagcctcaccaaggtgcccccctcctccctggtccaggagcgctccttctttgtccgcatgaaatccacgctcaccaagagggggctgcacgtcaaggcctcagggtacaaggtgggtgtgagcagtcaggctcctgtattccaggcagccatgtccccagattgagggtgaccgagggaaccaggctggtggcttcactggctgcaggtggcttagggaactgggtctgggaatgggactgggggggtcacacagtgtccagtcctccagcacctgtgggggacagagggaacccagcccagtgatggtcctcttgcccccactggcccgccttgtccctcctccaaccatgcccaccaccagcaggtcatccacgtgactgggcgccttcgggcccacgccctgggccttgtggccctcgggcacacgttgcccccggcccccctggctgagctgccactccatggacacatgatcgtcttccgtctcagcctgggtctcaccatccttgcttgtgagagcaggtaccggggttgggggctgtggcgggtggattgggggcacaatggagatctgggggtacatggggagtcagagggagtgctgggtctgcaggatagggcactggggagccatgggaggcggaacagcaatggatgggacagggtgatggggagaagggagggaaggcaggggaccagggcggaggcctagcccaggggtgccttcggggatggaagaggggctgtgtcttgggtccgggccctccttctggggctgcagatcttggcccgtctctggtctttcatttctcatttctctggtctttcatctctcatccatttcctctcctgcatcccgcagtggaggcaaattaagtgctgaaatagtcccatgctctgaggtgtccagggtgcctagggccttgccactagcatccacgcgaatactcgcagctgccccgggagagacactgttttgtggtttgtttgtttgtttgttttgagatggagtctcactctgtcaggctggagtgcagtggcgcaatctcagctcactgcaacctccacctcccgggttcaagtgattctcttgcctcagcctctcaagtagctgggattataggcgtgcaccaccacaaccagctaatttttgtatttttagtagagacggggtttcaccatcttaggcaggctggtctcgaactcctgacctcaagtgatccacacgcctcagcctcccaaagtgctgggattacaggtgtgagccaccgcgcctgccaacactgttattgcacccattttacagcaagggtgtgaaccccaggggactctggagccaactctgcctctcccccaaccccgtggtcttggactcctcccctcttctctgtcaccccccagagtcagcgaccacatggacctggggccctcagagctggtgggccgcagctgctaccagtttgtccacggacaggacgccacgaggatccgccagagccacgtggactgtgagacccacctccacccaccaagcctgcctaccaccccccagacccgagcatcccactccctggtccctggaagtccttcttcagggctgcccacagtccctcctgctgcacctacagctccagggactccgtttagcattggaagagcagcaaggagactgagtgatgcctcaggatgtgtgtgtggggggggggtctggggggctgtggggtctccaaaacacccaagaggcctcgctgctgggctacctctcagtctctctgactctgcctctctgtgctttcacctttttctcttctccccaccgtctccctgcccactcccctgctctcactcctcctgtctcctcctgtctacctggctctctgtcttgcccctgtccccaccccacccccttcccatctctccctgggctgggcccagtgctggacaagggtcaggtgatgactggttactaccgttggctgcagcgtgccgggggcttcgtgtggctgcagtctgtggccacagtggctgggagcgggaagagccccggggagcaccatgtgctttgggtcagccacgtgctcaggtgagggctgtgcccacccctcctgcagggcactcagggccctgctgtctctccccacctccagtgggggtgctttggggagggcttctagaatgggacaagcccagggggtctgcagacacgaaggggaaggaggggaggatggtgagagcagaggcccagagtggaacggtcttgctggcaggagacagagaggagtcgccagggggagggggacagtatctttgaggaaggcaggggcaggctcacagcctcctcaggctcaggtggagggtctggactcttgactctggggcactggcgagccacggcaggctcttaccaggggaggcccacagagcacagcaactaatggaaagaagcagggaggggtgttccaagcagaggaagggctccaagcaacagcctgaccctaaaggtaatgccttgggctggagtagaaagcagtgagaaaccagcctgaagatgacggcctggccttttggctcaggggcactggggagtcatagaaagctttagagctggagaggatcatagtcagatctgctttttagaaagactgctctagaccggacatggtggctcatgcctgtaatcccaacaatttgggaggccaaggcaggtggtttgcctgagcccaggagctgaagaccagcctgggcaaccaagtgaggtcccatctctattaaaaaaaaatttttttaattggcccgttacagtggcacgcacctgtggtcccagctacagcagaggctgaggtgggaggatcacctgagcccaggaggtcgaggctgcagtgagccgtgatcgtgccactgctctccagcctgggcgacagagtgagaccctgtctcaaaaaaaaaaaaaaaaaaaaaaaaaaaaggaaaaaacacccttctaggccaggcacagtggctcacgcctggaatcccagcactttgggaggccgaggtgggtggatcacgaggtcaggagttgaagaccagcctggccaagacagtgaaacctcatctctactaaaaatttaaaaaaaattagctgggcatagtggtgcacgcctgtaatcccagctactcgggaggctgaagcaggagaattacttgaacccgggaggtggaggttgcagtgagccaagatcatgccactgcactccagcctgggcaacacagtgagactccatctcaaaaacaagcaagcaaacaaaaaaacccttctagctgccatgaaggaggcactgagggacaagatgggcgctggaggaccagggcagaggctggggccagtcctgggaagtgccagactctatgggggaggaggggaggagaccatcttctgcccaggtctctggctttgctgagcccggatttgggctcctgagaggaacagcaggtttgaaaggaagatgtagacatcagatgggcatgaggtgccagaggacacccaggtggtgacatccaggtggccaccggctatccaggtctggccttaggagcgagggccacgctgggctagaagtcaacccggagtttagggatctggtgttgagccttgtaagtgcctcagggtggggactccacatttccccgtgggagtgtccacacattgccacaagttgggtaaagcaggagggagtcctgagaggccaaggacccctggctcctaaccgcatccatcttctccccagccaagccgagggtggccaaactcctttggatgccttccagcttccagccagcgtggcctgtgaggaggcatccagcccggggccagagcccacaggtgagccccacctcccaccttggcccctgggaagctccaaggaacctttgggtcctggctgtccattccagaagccactagccacatgcagccatttatatacaattaaaattaaaatccaggccggtgcggtggctcacgcctgtaatcccagcactttgggaggccgaggcaggtggatcacgaggtcaagagatcaagaccaacatggtgaaaccttgtctctactaaaaatacaaaaattagctgggcgtggtggcatgcgcctgtaatcccagctacttgaaaggctgaggcaggagaatcgcttgaacccgggaggcggagattgcaccactgcactccagcctagcgacagagcgagactctgtctcaaaaaaaaaaaaaaaaaaatttaaatccaggccaggagtggtgactcaagcctgtaatcccagtactttgggaggccgaggcaggcagatcaccaggtcaggagatggagaccatcctggctaataaggtgaaaccccatctctactaaaaatacaaaaaaattagctggacatggtgccatgctcctgtaatcccaactactcgggaggctaaggcaggagaatcgcttgaacccggagggcagaggttgcagtgagccgagatcatgccactgcactccagtctaggtgacagagcaagatttaaaacaaaacaaacaaacaaaaaattagctgggcatggtggcacgtgcctgtagtcccagctactcaggaggctgaggcaggagagtcgcttctacccaggagtcagaggttgcagtgagctgagatctcaccgctgcactccagcctgggtgacagagtgagactccatctcaaaaaaataaaataaaataaaatccaggcccggtgtggtggcttatgcctgtaaacccagaactttgggaggctgaggtaagagaattgctttagcctaagagttcaagacaagcctgggcaacatagtgagaccccatctcaacaaaaaattttaaaacttagccaggtgtgatggttcacacccatagtcccagctactcgggaggctgaggtggtaggatttcttgagcccgggagttagaggctgcagtgcgctgtgacagctgtactgcactccagcctgggtgacggggtaagacctcgtctcaaacaaatttatttatttttttagggggatggagtttcactcttcttgcccaggttggagtgcaatagcacaatctcggctcactgcaacctccgcctcccgggttcaagtgattctcctgcctcagcctcccaagtagctgggattacaggcacctaccaccatgcctggctaatttagtatttttagtagagacagtgttttgccacgttggccaggctggtctcgaactcctgacctcaagtgattctcctgcctgggcctcccaaagtgctgggattacaggcatgagccaccatgccctgcaaaacaaaacaaaacaaaaaacactttaaatccatgtcctcactcacacctgccacatattgcatgcacagtggccacatgtggccagtggctgcttcgtgggacagtgtggatgtagaacatttccattaccacagaaagctctatcctggaaacttccactgaagagcacaggtctagaccagggtatcttgatctctgctctactgacattttagggccaggtgattctgtgttggaggggacactgtgggatgtttattttacagcatccctggcctctaccctctagatgccaatggtgacctccccagggctgtgacaccccaaaatatctccagatattgccaggtgtctcctggtgacagaaccagctggccgggcacagtggctcacgcctgtaatcccagcactttgggaggctgaggcaggcagatcacctgaggtcaggagtttgagaccagtctggccaacatggcgacaccccatctctacttaaaatagaaaaattagctgggtgtggtggcacacacctgtaatcccagctactggggaggctgaggcaggagaatagcttgaaccccagaggcggaggttgcagtgagctgagatggtgctggtgcactccagcctgggggacagagcaagactccgtctcacaaaaaaacaaaaaacaaaaacaaaacaaacaaacaaaaaaaaaaaccccactcccagctgagaactacaggtctggcccactaagcacagctccattccacagatgggaagactgagggctggggacacacacaggccctcagcatcttcctcttccagagccggagcctccgacggaagggaagcaggctgccccagcggagaacgaggccccccagacccagggcaaacgcatcaaagtggagcccggcccgagggaaaccaaaggctccgaggacagtggcgacgaggatccctccagccacccggccacaccgaggcccgagttcacctctgtcatccgggcaggggtcctgaagcaggatccggtgcggccatggggcctggcgcctcccggggaccccccgcccaccctcctgcacgcgggcttcctgccgccggtggtgcggggcctgtgcacacccggcaccatccgctacggccccgcggagctgggcctggtgtacccgcacctgcagaggctgggtccgggccccgcgctcccggaggccttttacccgcccctgggcctgccctacccggggcccgcgggcaccaggctgccgcggaagggggactgaggactggcagagctgccggcgccggaccctgcgacaaccggggtcccccaggacagtaggcccggctctgcccgtagccctgagaattaaacgccggctctccctgcagtggtttgggctccgggctgtgagctcctctgtccatttctgtctcccccgggtcctcacccccctctccctccacccgccctcctgcctctccagttagtccgctcctcgccgcccttcccaaggaacacgaaccaatactctgcatctggaggaggggaggtcaggtttaatgtcccagtcctcgggcgctgtccagcgcctgccaggccccacggccgtgtcgctcactcgggtggcggccgacccgcctcatcagggccttccgcggaggccgtcccgtcgtcctcgggcaccagctccacgtccagctccagctgccccatgtagaggcccacggcgcacgcccagagcaggctggcggccagcacggcgcccgcgcccacggccgcgccccccagcgtcagctgcatgggtcctcgcagcgccgccaggcccacggcgtacgaggcgctgccccacaccacgcacaggccgcccagcaggaagaagcctgcgggagaggcagggtagcaacagggccaaggtcgggggatggtctgggagcaaagccagggttgaggagacaggaacagaggcagggccgtgccaggggctagcctgcatctttgagaatcagatcggaggggaggggaccataaccatgtcctgggccacccattcagatggacctagtgcctatgggaggggtgtcttctggtgggggaagaatgggggttctatacttactactgggagtgggatggggtaggagagtctactctcaccagggcaggtgataggggctctgcattccctggttccgtggggcgagagggggggtctgcactcaccatatgctgcttcccgacccatgtcactctgcatgaaggagatgaccccgatgcccgatgccaggaggccattgcggaaccaggagaggaaggctggagggagggggacatggggggattaacatcacccccaaccctacctcctcaatcccccttacccagtcaaactgaggggcctcccttcagctcaccccatcccatccagccgcaaggcaagcccatcccaaatcctcacctcttccaggaagccgctcacctaaccatatccccccacatcctctctggcctccacctcagtgcccctctcccccaaactctgtaacactaaggattcaagggccgggtgtggtggctcacccctgtaatcccagcactttgggaggccaaggcaggcggatcatgaggtcaggagtttgagaccagcctggccaacatagtcaaaccctgtctctactaaaaatgttaaaattagcagggtgtggtagcacgtgcttgtagtcccagctactcaggaagctgagggaggagaatcacttgaatccaggaggtagaggttgcagcgagccaagatcatgccactgcactccagcctgggcgacagagtgagactccgtctcaaaaaaaataaaggattcaagatagtccctgcagaatgtggaggacaatctaggggcaaagttgcagaacctccatctgaggagtcatcttggccaaacccctccctctacgtgtacccccacggcctgcccactcacttctttctcagaactctgggacaaactgtttcctaatccaggccgctcttcagcctcgcccttcttttccttcaaatgccgccatctcctaccgagtatggcctgggccaatcccatccatgtcctaccgagtatggcctgggccaatcccacccacgtccgtccccattcacgtcctttacaaacagcccaccacaccctatatctagatgcccggtcctggcctagtgaggtgactcacacctataatcccagcactttgggaagccaaggcaggaggattctctgagcccaagagttcagaccagcctgggcaacaaagcaagaccccgtctctacataaattaaaatagttgggtgcggtggtgtatgcctgtagctccagctaagcaggaggctgaggcaagaggatagcttgagcccaggagttcaaggctgcagtgggctacgattgcgccactgcggtccagcctcggtgacagagcaagacaccgtcattaaaaaaataaaattaaaaaaaaaacaaacatggccagtccgctccattctggacctcgcctccgtcacaagccccgccctctgcagcctagatcacctccccctccaatcagcagagagctttctcccgattggttgtccccttctccaatcctgaacttccccctcttctgcggggatccacactcccgctctctgcacagtggtggcctctgcaatcgggatggacccatcttgtacccaactccacagaccctaagctctccctgaagcccctctccccacggcaggcgcgattctacgaggctgcctcgcgcaaccctaccaccccctccaatccctacggcgccccgttacccggggtcctcgtcctccccgcaagcccatcccctctgcgggcacctgcgctcttgcagtctgcgcttccgtgcgctcacactgaagcccttctcggagccgagcccgggccccgtttcctgcagaagcccccgccccatcaaggtcccacgcgagcccgggacccccgtcccatccgcaccgcccccacccctagccaccgacctgtctcgtgcgcttttcggaggagccaggcgtccgcacgatccagctcggacactgggggcggcgaagccccggcgcggggaccgtggccgggggcgaaggacccccgggcgcccccgctccggggccgctgaggcggcagtagcgacctccggaagcgaagacgggcaaggcgagcggcccgagcccaccaccagccgcctcccatgattcgcactacggccgccgcgcgccgtaccgccccaccggcctccggtaggttgcaacccatgtcactcaggatgaatggcttacccattggctatgcgctcgccactcaggtccggcgtgaactgtccattggtcggaatggcagtgattccctcctctgtcatctaggccggtagtgcccgtccctccttgattttgtaccggactacgaatcccagcgatcattgcgctcggggaaagccgatattcagaagtcgcaggcgagatgtctgctgggaattgtagttttaattctatcttttttaacggagtacatgccgagcacctattgtagttgtttcttggttgtttctctttctttctttctctttctttctttctttctttttctttctttctctttctttctttccttctttctttctttctctctttctttttccctccctccctcccttccctcccctccttccttccttccctccttccttttttttccccgccccgagaccgagtcttgctctgtcgcccaggctggagtgcagtggtgcgatctcggctcactgcaacctccacctcccgggttcaagcgattctcctgcgtcagcctcctgagtagctgggattataggcatgcgccaccacgcccagctaatttttgtatctttagtagagacagggtttcaccatgttggccaggctggtctcgaactcctgacctcaagtgatccaaccgcctcggcctccaaaagtgctgggattacaggcgtgagccaccgtgcccggccaggtctgtctctttaagacagatttgttttctttgccctaacccattccgggattcagctttgccttctctcatcagcataaaccttttcactagccaggaatgtgaaaaatgtgtctggaatattttcaatttgcacttaatcccatttaaagcttcacattcattgcaagcctgcaggctatgcagtgcagtccatttgaactccctcctcaagtgtaacccccttgctagctcccctacttttcctcttcataaaatccaagcccgggccaggcacggtggctcacatctgtaatcccaccactttgggagtctgaggcgggcagatcacgagatcaggagttcgagaccagcctgaccaacatggtgaaaccccatctctactaaaaatacaaaaattaggcatggtggcaggcacctgtaatcccagctacttgtgaggctgaggcaggagaatcgtttcatgcgcgtccatgtgaagagaccaccaaacaggctttgtgtgagcaagatggctgtttatttcacctggctgcaggcaggctgagtccgaaaagagagtcagcaaagggtggtggattatcattagttcttagaggttttgggataggcggtgaagttaagagcaatgttttgcgggcaggggtggatctcacacagtacattctcaagggtggggagaattacaaagaaccttcttaagggtgggggagattacaaagtacattgatcagttaggtggggcaggaacaaatcacaatggtggaatgtcatcagttaaggctatttttacttcttttgtggatcttcagttacttcaggccatctggatgtatacgtgcaagtcacaggtgatgcgatggcttggcttgggctcagaggcctgacatttctgccttcttttattaataagaaaaataaaacaaaatagtgttgaagtcttggggggtggtatggagagagaatgggcgatgtttctcggggctgcttcaagcaggattaggggcggcgtgcgaacctaaagtgggagagattaagctgaaggaagattttgtggtaaggggtgatattgtggggttgttagaagaaacatttgttgtgtagaagtattggtgatggcctgggtacagttttgtatgaattgaaaaactaaatggaataagagaaggagaaaaacaggtataaaaggtctaagaattgggaggacctaggacatctgattagagagtgcctaaggagattcagcatagtcctgccagcaaagattatttgtttacttcaggagttaagagtggcagtttggggatagcatgaggagatatcagctgtgatggcttggagaaacagtgtaaaccagcagtgtaaacaagagcagggcacgtatgagtagttgagaacggagaataggagtatgactagacagaaaatagtagggatgacaagtttttttggggcacagtctaagttggtccggtgtctggaatgagactggggcctaataaaaaggattgtccatacaggagctcaaataggctgtaccctgcagcattctgagaagcaaaagaggtaaaagtattgtccagtcctttttaagttggtggctgagcttggtgaggtgtgtttttaaaagacctttagtccgttctacttttcttgaagacagaggaccgtaagggatataaaggtttcactgaatactaagagcctgaaaaactgcttggctgatttgactaataaaggctggtctgttatcagactgtatagaggtgggaaggctaaactgaggaattatgtctgacagaagggaagaaatgactgcggtggccttctcagaccttgtagaaaaggcctgtacctatccagtgaaagtgtctgcctagactaagaggtattttggtttcctgactcggggcatgttgagtaaagctaatttgccagtcctgggtgggggcaaatccctgagcttgatgtgtagggaagggagggggcctgaataatccctgaggagtagtagaacagcagatggaacactgagaagtgatttccttgaggacagatttccacgatggaaaggaaatgagaggttctaagaggcgggctcatggcttgtactatagcatagcctgcctttgctggtgtgtggcgattaggcctggtggaactgccatcaataaatcaagcgtgatcagagtgaggaacaggaaagaaggaaatatggggaaatggggtgaatatcaggtggatcagagagatacagtcatgggggtcaggtgtggtatcaggaataatgtgggaggccagattgaagtccgggccaggaacaatggtaattgtgggacttaagagtgagtgcagctgaaggagccggggagcagaaagtacatgcgtcaggtatgaggaagaaaatagattttggaagttatgagaaatgtagagagtgagttgagcatagtttgtgatttttagggctctaaaagtattaaagcagcggcagccgctgcatgcagacatgagggctaggctaaaacagtaaggtcaagttgtttggacagaaaggctacagggtgcggtcctggctcttgtgtaagaattctgaccacactaaccatgcctaggaaggaaaggagttgttttgtaagggattgaggtttgggagattaattggacacgatcagcagggagagcacgtgtgtttttatgaagaattatgctgagataggtaacagatgaggatgaaatttgggcttgactgaagtaatgggggctgtctgtgaagccttgcggcagtacagcccaggtaatttgctgagcctaatgggtgtcagggtcagtccaagtgaaagcgaagagaggctgggatgacgggtgcaaaggaatagtaaagaaagcatgtttgagatccagaacagaataatgggttgtggagggaggtattgaggataggagagtatatgggtttggcaccatggggtggataggcaaaacaatttggttgataaggcacagatcctgaactaacttgtaaggcttgtctggttttaggacaggtaaaatgggggaattgtaaggagagtttataggcttaaaaggccttacccattgagcagggtaagggtgattaggttttaatgagatggtaaggggtgcatgatcggttgccaaggaaggagtagaggtatcttatacttgtgggttaaggtgggggaatacaagaggaggacgcaaaggaggctttggattgggaagaagggcagcaatgagatgtagctgtaatccaggaatagtcagggaagcagatgatttagttaaagtgtctcggcctaataagggaactgggcaggtggagataactaaaaggagtgctttaaagagtatcgtctaagttggcaccagagttggggagttttaagaggtttagaagcctggctgtcaatacccacaacagttatggaagcaagggaaacaggcccttgaaaagaaggtaatgtggagtgggtagcctctgtattgattaaggggacggacttatcttccactgtgatagttactcgaagctcggcgtctgtgatggtctacggggctttcgaggtgatcgggcagcgtcagtcttcagccgccaagccgagaaggagtcagtcggagagccttgggccagagttccaggggctctgggagtggctgccaggtgagttgaacagtccgattttcagtggggtcccacacagatgggacgcggcctaggaggaatcccaggctgcgggcattccttggcccagtggccaagatttccagcatgtgtagcaagttcctgggggaggaggttctggaggaacgcctggctgctgcggttcgggcgtttggaagttcttgcgtgctggagatgtggctggggtttgtctcacagtggaggcaaggaattgcaactttttttctgttattgtacaccttgaaggcgaggttaattaagtcctgttgtggggtttgagagccagattccaatttttggagttttatttaatgtcaggagcagattgggtaataaaatgtatattgagaataagacggccttttgaccttttagggtctagggctataaagcgtctcagggttgctgtcaaacgagccatgtactgggctggatttttatatttgaagaaaaagagcctaaacgccatctgatttgggataaagaaaaaggagcattaaccttgactatgcctttagctccagccacctttttaagaataaattgctgcgcaggtggggaagggctagtcacggaacgaaactgtaaaccataccgggtgtgaggaggggaggtgatgaaacgattatagggtggaggagcggaggctgaggaagaattgggacctagcttggcctggcgaggaggggagaggtcagttgggtctgtagaaaaggaagattagaaacactcagcaacgcttggggttgggactgaggggacaggtgggagggaaagaaggaagatttgggacgagttgcattgggcacagagactaggaagggactgtgatgtgtaaaagaatgcctggacgtcaggcacctcagaccatttgcctattttatgacaagaattatttagatcttgcaggatggaaaaattcaaagtgccattttctggctatttggaactactatcgagtttgtattggggtcaagcagcattgcagaagaaaataaggcgtttaggttttaggtcaggtgtgagttgaagaggttttaagttcttgagaagacaggctaagggagaaggaggaatggagggtggaagtttgcccatagtaaaggaggcaaacccagagaaaagagagcgtagagacacggagggaaggggttcagggttcttaccctccagaaaagcaggaagcggggtcggggcatggaaataagggattggggcacagagataagaggttggggtgcggaaataagggattgggggttcttgacccctagaaaagcgggacttgccactaagggtgaaggagaaggggttgatgggtacttgtcccttccccagaaaagcagagaaggggtagagacacagagaaggggttggggaacttgcccctcccccagaaaagcgggacttgccaccaaggatgaaggaccaaggcaggcgtccctgcgtggtctgacacctttgaaacgtgggtgaataatcagagaggcgtccttgcaatgattaaacaccaagggaaggctgccttcccagtccgtgaccggcgccagagttttgggtccacagataaaacgtgtctcctttgtctctaccagaaaacaaaaggaatagaaattaagagaagggagagattgaagtgtggcgccaagattgaaaggagaaagaggttgagagatagtgagggaggttggaaaagagtaaaaagaggccgcttaccggatttgaaattggtgagttgtttcttgggctggtctgtctgaggacctgaggtcgtaggtggatctttctcacagagcaaagagcaggaggatgggggattgatctcccaagggaggtcggtcccccgatccgagtcacggcaccaaatttcatgcgcgtccgtgtgaagagaccaccaaacaggctttgtgtgagcaacatggctgtttatttcacctggctgcaggcaggctgagtccgaaaagagagtcagcaaagggtggtggattatcattagttctgagaggttttgggataggcggtgaagttaagaacaatgttttgcgggcaggggtggatctcacacagtacattctcaagggtggggagaattacaaagaaccttcttaagggtgggggagattacaaagtacattgatcagttaggtggggcaggaagaaatcacaatggtggaatgtcatcagttaaggctatttttacttcttttgtggatcttcagttacttcaggccatctggatgtatacctgcaagtctcaggtgatgcgatggcttggcttgggctcagaggcctgacaatttgaacctgggaggctgaggttgcaatgagctgagatagtgccactgcactgcactccagactgggcgacagagtgagactccatctttttttttttttttttttttttgagacggaatttcgctctgtcgcccaggctggagtgcagtggcacagtctcggctcactgcaagctccgcctcccgggttcacgccattctcctgcctcagcctcccgagtagctgggactacaggcacccgccaccacacccagctaaattttttttgtattttcactagagatggggtttcaccgtgttagccaggatggtctcgatctcctgagctcgtgatccgcccgcctcagcctcccaaagtgctgggattacaggcgtgagccaccatgcccggccgagactgcatcttaaaaaaaaaaaaaatggccgggcgcagtggctcacgcctataatcccagcactctaggaggcctaggcgggcaaatcaccaggtcaggagatcgagaccatcctggctaacatggtgaaaccccgtctctactaaaaaatacaaaaaaaattagccgggcgtggtggtgggcgcctgtagtcccagctactcaggaggttgaggcaggagaatggcatgaacccgggaggtggagcttgcagtgagcctagttcacgccactgcactccagcctgggtgacagagtgagactctgtctcaaaaaaagaaaaaaaaaaaaacggctgggagcagtggctcacgcctgtaatcccagcactttgggaggccgaggtgggcggatcaccaggtcaggagatcgagaccatcctggctaacgcggtgaaaccccgtctctactaaaaatacaaaaaattagccgggcatggtggtgggcgcctgtagtcccagctactcgggaggctgaggcaggagaatggtgtgaacccgggaggcagagcttgcagtgagccgagatcgtgccactgcactccagcctgggcaacagtgtgagactccgtctcaaaaaaaaagaaaagaaaaaaaacaatccaagccttacttagtgaaagataaaggagctgattttaagaggggcctggcccagcaggctttgtagccaaggtccaaaggggcagtggagggctctggaacatcttcctctcattggtgggtttaagctggggagcaacattaccagatgcacatttagaggatcctcgaggctgagcacaggggcttatgcctgtaatccgagtgctttgtggggctgaggtgggaggatggcttgaggccaggaattcaagaccagcctgggcaacaaaatgaaacctcatttcgttttttgtttgttttgagacagaatcttgctctgtcgcccagactggagtgcagtggcaccatctcacctcactgcaacttctgcatcccgggtccaagcaattctcctgcctcagcctactgagtagctgggattttaggcatgtgccaacatgccaggcaattttttttttttttttttttttttttgagatggagttttgttgttgttgaccaggctggggtgcaatggtgagatctcagcttgctacaaactctgcctcccgggttcaagcgattctcctgcctcagcttccctagtagctgggactacaggcacccgccatcacacccagctaattgtttgtattttcagtagagatggggtttcactatgttggccgtggctggtcttgaactcctgacctcaagtgatccaccagcccaggcctcccaaagtgctgggattataggcatgagccaccacacatggctttaacatttttttctgatcaagagttcacagttgcccttttcttgttttttattttcattttctgtagagacggggtctccctgcgttgcctgggatagtctcaaactcctgggctcaagcgatcctcctgcctcagcctcccaaagtgctgggattataggcatgagccaccttgcctagcctagctgcccccatctgactgctgctttgactagagcaaacttgagtcaggtttatctccttccatgggcccctgaacttctagctcaccctcaagtctgagcaagcaatgaaatgtggaaggtgcctcctggttagcttatcctgagaactgcctgaccccacatagccctgtttcctgttgaatgatgcagtcggcttagtccctgtcatctgcccaaccttcccagactgcaaagcccccttaacatagaaaatgaatggctttttttgtttggttttgagatgcttgcagatttctgagactaggacattctccctaatgcaacaaactttatgaagtttctcagtatttaagtttggatatgttgttttcttttctttctttcttcttttttgagacagagtttcactcttgtggcccaggctggagtgcaatggcatgatctcggctcactgcaatctctgccaacggagcatggtggcacacacctgtaatctgagctactctagaggtttgctaatttgctagcagaattcacggaactgggcggagtgcagtgctcatgcctgtaatcccggcactttgggaggctgaggtgggcagatcacttgaggccaggagttcaagacctgccatggccaacatgctgaaaccctgtctgtactgaaaatacaaaaattagccaggtgtggtggcacatgcctgtagtcccagctacttggggggctgaggcacaagaatcgcttcatcttgggaagcggaggttgcagtgagctgagattacaccactgcactccagcctgggaagcagaaagagattcttgtctcaaaaaacaaacaaaaaggccaggcacggtggctcacgcctgcaaacacagcactttgggaggccaaggcgggcagatcacgaggtcaggaaatagagaccatcctggctaacacggtgaaaccccatctctactaaaaataaaaaaattagcctggcatggtggcacacgcctgtagtcccagctacttgggaagctgaggcaggagaattgcttgaacccgggaggcggaggttgcagtgagccaagatcacgccactgcactgcagcctgggcaacagagagagactccatctcaaaaaaaaaaaaaaagaagaagaattcattgacagctgccgtgctcccggttatggtgtattacagtgcaagaatacaggtgaaaatcagcccagggaagacgggcattcggcagagcctgggggcggggtcccatcctgaggcttccagccctcttgtccccatggaatgtggacagcgctcactttacccagcaacagtgtgtgacggtacatgtggagctttgttgaccagggaagctctcggaagcctcactgtccagaaccttcattacccctgagacgcgtaaacccagtcgtcctccgtgagactgaggtgacctcaggcgccagcccttccagaggtcagctgataccctgtgaccccagggccccaccctgagtcacattgttactagcctagttggcccaaggctgataggtaaaccaagataatcttatcaggaacgacattccagagatttagaggagatgacctcaaaggcactgaggacaaaggtcttacctctctttggggaaggttaaattcttcattacactgaaccaaacaatgcaggccgactccagaagctgaaaaaagataaagaaatgaattctcctccgagtcccctgagcaggaacacaacccagctgacattttcgttttatttatgtatttattttattttattttttacttttttttttttttttgagacagagtcttgctcagtctcccaggctggagtgcagtggttcaatctccgctcactgcaaactccgcctcctgggttcacgccattctcctgcctcagcctcccaagcagctgggactacaggcgcccgccaccacgcccagctaatttttttgtagttttttagtagagacggggtttcaccatgttagccaggatggtcgtgatctcctgacctcatgatccgcccacctcggcctcccaaagtgttggggttacaggcctgagccaccgcgcctggcctattttttacttttaattaattttttaagacagggtatcactctgtcacccaggctggagtgcagtggcttcatctcggctcactgcaacctcggctttcagggctcagcctccccagtaactgggaccacaggcatgcaccaccacacctagctaatttttgtattttctgtagagttgggggtctcaccatattgctcaggctggtcttaaactcctgggttcaagccgtacacccacctcggtcccgagagtgttgagattagaggtgtgagccactgcaccctgccgttttatttttttaatttgtatttttgtgacagggtcttactctgtcacccaagctggagtgcagtggcgcgagcatggctccctgcaacctagacctccccagctccagtgaccctcccctctcagtctctggagtagctgggactacaggagtgaaccaccatacccggctaattttttttttgtttgtttttctgacggagtctcgctttgttgccaggctggggtgcagtggcacgatctcggctcatttcaatctccgcctcccaggttcaagtgattctcctgcctcagcctcctgagtagctgggactacaggcacccaccaccacacccagctaatttttgtaattttagtagagacagggtttcaccatattggtcaggatggtctcaatctcttgaccttgtgatccgcctgcctcggcctcctaaagtgctgggattacaggtgtgagccaccatgctcggccctatttttggattttttagtagagacagtatcttgccatgttgtgcagactggtctcgaactcctgggctcaagagctcctcccaccttggcctccaaagtgctgggattacagatgtaagccacaacacctggctacatcttggtttttagacttctgatcttcagaactgtaagagaatacatttgtggccgggtgcggtggctcacacctgtaatcccagcactttgggaggctgaggtgggcagatcacccaaggtcaggagttagagatcagcctggccaacgtggtgaaaccccgtctctactaaaaatgcaaaaattagctgggcatggtggtgggtgcctataatcccagtcactagggaggctgaggtaggggaattgcttgaactcaggagatggaggttgcagtgagctgagatcatgccactgcactccagcctgggcgacagagcaagactctgtctcaaaaataaataaataaataataaataaataagtagaatacatttgtgttgttttaagccactaggtttttggtcatttgttacagtggcaacagagaatacagttatgaaacccaacaatggatatagttgtgaggatgtgagaagtctacagaggaaagtaaaaggaagaagggtggggaagggagggtgaagaaaaaacaataaaaggaaagaaaagaaagtagatggaatgatggttcagatgtaataattttatttatttttatttatttctttgagacagagtcttactctgtagtccaggctggagtgcagtggtgtgatctcagctcactgcagcctccgcctcctgggttcaagcaattctcctccctcagcctcccaagtagctgagattacaggcgactgccaccacacctggctaatttttgcatttttagtagagacagggtttcaccatattggccaggctggacttgaactcctgaccttaggtgatctgcctgcctcagaggttgcagtgagctgagatcgtgccactgcattccagcatgggctacagagtgagattccatctcaaaaaaaaaaaaaaaaaaaaaaaaaaagagagagcagggtaacagggttaattgttgtccccaaaaacatatttctacatcctaagccctggaacctgtaaatgaactaatgaactgtatttggaaacagggtctttaaaaaatatacatatataagctctcactgttgtccaggccagagtgtggtggtgtgatcacagctcacagcagccttgacctcccaggctcaagggatcctcctgcctcagcatcccaagtagctgggactacaggtgcgcccaccacacccagctaatttttcctgtattttgtagagatggggtcttcctatgttgcccaggctggccttgaacgcctggcatcaagcaatcctcctgcctttgcatcccaaattgctgagattacaggcgtgagccaccacacttggctgggaaacaggatatttaatgaaagatcttaagatgagattactcttgattacttggttgggttctaaatccagtgaagagtctttttttttatttgagatggagtcttgctctgttgcccaggctggagtgtaggggcatgatctcggctcactgcaagctccgcctcccggcttcacgccattctcctgcctcagcctcccgagtagctgggactacaggtgcctgccaccacacctggctaaatttgttttttctgtatttttagtaaagatggggtttcactgtgttagccaggatggtctggtctcgatctcctcacctcatgatccgcccacctcggcctccaaaagtgctgggattacaggcgtgagccaccgcgcccgactgagtctttctaagagacagaagacacagacacagaggagaaagctctgggaaaagatggaggcagagattgaagcgatgtcaccacaagcccaggattgtccatggccaccagaagccaggagtggaaagcaaggattctccctagagcctcagaggcagcctggccctgtggacaccttgatggtgcacttctggcctctagaacaaatttctgtcatgttaagccgcccagtctgtggagatacgtaggcagccctggggctctaataccaatggaatgccaaaatggaatttagaaaatgcaaccagccggccaggcacagtggctcacacctgtaatcccagcactttgggaggctgaggcaggtggatcacctgaggttgggagtttgagaccagcctggccaacatggcgaaactccatctctgctaaaaatacaattagctgggtgtggtggcagacacctgtagtgccagtgactcaggaggctgaggcaggagcatcacttgaactggggaggcagaggttgcagtgagccaagatagcaccactgcactccagcctggcggacagattgagaccctgccacaaaaaaagaaaagaaaaacaaaaaacaagaaaatacaggaaacagttaacacctgtagaatctgggcagtggatcagggcaggtactcaaagagcacctggcaccagttgttggtcccagtgtccaggtaaccctgggctgtggaaagctcgaccacatcctggtgctggtggccatctctgccctccctcagcctccataccttcctccaatggagatgttcctcaggctccacgcacttcctgagcgacatggtccactcttgcagctctattttttttttttttttcaagacggcatcttgctctgtcacccaggctggagtgcagtggcactgtctctgcctcctgggttccagtgattctcctgcctcagcctccagagtagctgggattacaggcgcccacaaccacacctggctaatttttgtatttagtagagacggggcttcaccatgttgaccaggttggtctcaaattcctgacctcatgatccgcccacctcagcctcccaaagtgctgggattacaggcacccgccagcacacccggctaatttttgtattttagtagagatgggggtttcaccatgttggccaggatggtctcgaactcctgacctcatgatttgcccacctcagcgttccagagtgctgggattacaggcatgagccaccgcgcccggccaactgcatgcgtttttaaagctgttgcagttcttctgcccatcctgctgctgagggactccctcccctttatgtaaactccaagaaaaccctctatcttgtttgctgggtttgggtctcagccttttttattttttttaagagacaggggtctcactctgttgcctggcctgctggagtgcaggaaagtgatgtagctcactgcagcctgaactactgggttcaagcgatcctcctgcctcagcctcccgaagtgctgggatgagaggcgtgagccactgcgcccaaactgtattgatcatgcattcagccatctatccacccatccttcatatttgttgatgcatttcaaagtaagttccaacatcacaacagacccctcctcagaggatacccctggctatcacatgggtagggtgcctgctaaagctcgtcccgtccctggaagccagcccagctgtcctgtctgtgttaatggtctttctatgagcactgcaggggcagatccaggactgtgcaggtcacccctggatcccaaatgctgagcgtggcccgcacagaagctcagggaccttgggatgttgctagtaggtgatctactgccatccactgaggacagctgacactgtttggaggcacaaattgtccctcagtgtcctcatgttaccctgaggccgaccgctgagagaataggtccttgtttcaccccccagccaccttccaccctcgttaattcccagggcaagggatggtctggggcagcctggagagaccagacccacaagctttttaaaataactgcatcctttaatggcagtaatacaattactggattaagagaccacaggagaaaggcaggtgacgtttctggaagacagatatggagtataaaaagggtgtgaaatagtcatgcggcgatcattgtaaaaatacagttcattatatacatatttgcaccaccaactctcaactctgaaacagtatttacacttttgttacaatcctggttagagaacaatttttctttaaaagctcggcctgatggcaaatgagaatttcgggtgaattcatagtcctatgaggttcttaggctgaatattccaagaggagggctccagcttctatttcatccacagatttcggtttaaaaaatatttttcttttacaaaagaaaattctcaaaaggagaggaaaaacaacaacaaaaaccacaacactgccacactgtgtattcatacttattttacaaacaccaagggctgtgccctctgcttcaaggccaacactggtggctgaagacaaatctcattaatgattgtgtaaaaaaaaaaaaaaaaaaaaagacaaaaagacaaaccaaccaaccagatcccagcactgacccctcagggctgtgcagccctgtaggacaccctgcctcctggctccaaactatgagtttttcatttttctctttttggggtggggtgggataggagccttgttcaccccaccctgaggaggagggaaggggaatcccttggcaggtaactaggtctcttcatggtcagcaatgaagagcttggcctgcagccacatggtgggccagggagacgggcagatgcagccacaagcacacacttcctgaggcccctcaagtggcccagaggcaggatagcaggcctcccccagcaccccttgcgcccatctctcgggctgtgtccataggtgggcctcctccagggctctgcagatgaggctggccctcagccagggtgggagcatggggggagcagaggctccccatcccctggctgcagggttcccactcagtccgtttcttaagtgtccacaaatcccacagagcaacacaccttggaacacctgcatctgctggcttgggaaaggaaacccgaacacatcaatacctcatgccctgcaggtcacacagtgtaaggaggtgcgaggaaaacagagaacacttggccaggagccaccccagggtccccattgttggggcctggcggcgcagccactgcacggatcctggagctgtccggggctgggctgcagtgcaggcatagcgggtgcgtggcttgaggaccaggacagaccctggtgtgggcaagcagggtgtggcccacctgataggacaggtggggtaatactgacagaacgtgcgtgctcctaggggctgcctcctagaggtggctcttcaggactctgccccacaccggcccccactacctttgggtccagttctcactgtggaggcttctgctgcaggctggggggcatccgcttgctctagacggagggtggcagggagggcacgtgtggtaatccagggacaggagcaggcatgcgccagggagcccccatagtgccgctgggggctttttccttaataccttttcactctcactgtctcctgagtgggttgttacagcctgcactgaaaagacagtgatggtgcaccctagggttctagaaacgcctggacctgcttccacgcaggccctgccatggtcttggttccgggtctcttcgggcacagggtgaggagcgttcaataccttcccagacaccaactgttccctttgtcctggggaaaaggggccatgctttgcccagaaaacccactgggcctccagcaaggcccggccacgcagagcccacagagtctgaggccaggcactggcgaaagttcacaggtttgcgggcatgagtcggtttgctcagcaggagcccctgagcccgccacactgaccagaacttaagatggttatatacaatttacaaatctcaaagaaagtactactttaaaaaaaaataaaagagacggaaagcaaaagaaaaagaaaagaaaaaaggaacacccagcctgcctccccttgcccccaagttccctaccctgggtgctgccctgaatgccaccctaggaagggtggctggagccgcagctctggctggacactactggcaaaagggggaggccgtggggtcgaagcctttaaaaacatccttcagggatgccgcatcctgctcaccctcgcgggccggactgttcccagcaaatgggcttcctgagcccgtcttgggtgtctgcttcaccgtcccgaagagggtgggcacgggcaggttgtgcaccccgggctggggtggggcaccctcggggggtggggtggcggtggtggcagcgggggctgcagcagccttgggccggggccggttgtagctgttgtatctgtccgtgggggtgcccccatcagcaccggccttccctgtctctggctgttccagggcagacttgcggacgaacgggggctccttagccttggaggccgagctcttgccattgccctcagcacccttgggctgggcacccgtgtcagcagccggctctgtggctttgccccccgcgttgggagtcctcgggtcgtagaggctgataccgctcagcacactgctctgcccgccccctccgccctggcccagtccaccggccgccagcacgcgggggtcgtagggagcggtggctggtggggaggcatccccactcgggctggcggtgggagagggcgcctcagcagggccgggcttggcagcccgggaggaggccgtagagtctgtgggtttctgcagccgagggtcggtgggggccttccgcacccgggggtcactgggtttgtcgctggaaccgggggcggccgaggagccggtggcattgactgtcttgaggatgcgagacagaagttcaaagtcggggaggttggcgccctgtgtgctggaatccgtggaggcgcccgggcgctgccgggcgttggggggccctgccgtggcagcgcggtgcagccgggggtccagggtgggcatggattgcagggccgcgggcacggggggcactgcgtcctgcttggggatgggtagggggatcaggtcctcgggattccagagcacggtgcgggcgaagctgggcttgctcagggtcacgtccttcttgatgtggctgaactgctgcagctgtgaccgtgggtcccgcagagggtgcccggggagtgggtccaggggaatgttcacggccttctcccgcagggcccgctccccttcctcctcctccgttgggggcggcccagaccccttggaactgctggggcccacagggctggaatgaaggctgccttcgggcttggaggtgggcagggcgcgagccagccgaggatcggagggtcccgaatcacctgggccagacccgccagaagcctccacatggcgggtgagtctggggtcccggctgaggcgagggtcagccagccggcttcctgtggggtgtcccttctggaggcgggggtcccccagcccactgctgctcagctccccaactgaagccgggggtcggctggacgtctgctgcctcaaggtcttcaggatggaggtgacactgcttccaccctcatcctcatcacttgagtaccagtttccggtgtcacctgggaaagaacagaggagcagggaggggtgagtgggcgcatccaccacccgccctcttggatcccacagcagcccaccgtgagcagctcctttgcttgtgcctctcagaacctcaggtcctcctctctaaggctccctccccacagtgggcggctgaggagacccagagagctaaggcgctcggtttatgccatgctccccagctctcctcagtggcggcactgcactaagtagtttgttttatttaaataactcacaaccaccccaggaggtagtgatactatcatgcccatttgacagatgtgaaaacagaagcacagtgccgttacattggagtcagggccaggatcgggctaggactcctaacccagagctctgctgtttcctcccgcccacctccgggctggttcagcccccactgtggcaagtccagctgtgggcacctctttctggaggtcctggtagcagacaccattgactcagttctggctgggcctggggctcagagacacttgaccccaaaccggctcgtgatgtccccatgtcccagggaggggctggtgtggaccaaccgcagtcaccagctgataagaggcagggccggctgggcagactcagacatgggctcaagcaaaacctaggccagtacagcctgggccatcaggggagcggcccctcctcctgctgtcccactggctcctgcgctacagtcagggccacctgtggcctctggcttcaggatctagacaccacttgtcattttaccccaaagtggacaccactaagtcaaccatgcagcaactgagactcggtggctcgtgactatgattattactggttaatttcaatgactagctcttgtttgttggctccttgagaacacggtaggaaaacaggggctgtgagggtctccctaaagcctcctctggcagggcacaggcggtcaatcctgttggccactgtctcctccaggaactagccctccatcctactccatgggatcagggtctctcctgaacccaacacagaaagccacccctgactgccagttttctcagggacatgcagcagccccagcccggcttcatggccctggacaggggtcctccctagccatgggctccttcctgacaggaaacccaacctggaacaccccaccaccgccgctcccctgcacagcggcctggggcctgtgccccggcccctggggcggacacgtgccttcctcattctcccggtcctgcttgctgctctcagccagcctcctcgctctctcctcctcctcctgctgcttctgctggatcctcaggtacagggccctctgggctgagggcaggaagtcagggacaccggcgcctggcttcggccggcctgggggccctccctcagagaagctgtcgggctccagagggtgctcagggaagaggtgctccccaggctcccctggcagctcttcgtagtgcccgtagtcctctgtggcagggaagaaccgagggttcatgtcgggaagggcctccaggtgccaactccagcccccctgcccctcactgcaaacccacaccgatggcgatggagaaggacgcacagcctgcccctgcctgccctccccaggtctcaggggaacagagcggcccatgggtagccccgcctacatgaagaatgaggttcacagagagggttgagtgatgcgggcaaacgcttatgaggtggaaacaggatggaacattggatgtacgtttgtaagacgcaaggagaaagctttgaaaagacacacagaaacagtccctctggaacacagattctggagaggccagggatttctgtactctttcctgtacttttaaattattttggatggataggagttgcacggtttctttctaacaatcagtaaggaaacaccatgcatctcatagtgaactcgaccatgttcaacactaaaagccaggaaaagagaatgaaacgggtcaagtgctgctctggccacaggtcaacagcagttccagagtgcctccctgcccactccacagcattagggggtgtctcaggaagcacggggcctccacctcctgcagcgtgggcactggcaccagccacctcaccccacacactcccccagtgcctgagccaagagctgtgggcagcagcacaggctgacgtggggacgcagcaggcgtagaggggagggcaggctcggcgacgcctcctgcatgttgcgtgtgtgacacatgtgagcatgggagacatcgaatcaccgaaacggaggggggggcgtctggagtcagtgctgccccacagaacgctctgcagtgatggaaatgttctagatctgcagggcaacatgtggccgcctagatcctcctggggcagctgagcatttaaaacgtggtgtctagaaaagtgcacttgtaacttagcttacattaatttcaacttcgtcaagtgaacctgatgggccagcctgctctatgacacatcccagcgcagagctgggacccactccatgaaccagacagccgagggtcccccttcacacacagtctgtgcacacaccagaaaccaatgaccatacatgttagagggaggattttatgaaatgggattattctagagacacctactgctaccaacgtgacggacttctggtgccccgccagcagagcttttcccgtgcaccttttagacgcatttgttgaagggggaggagctgagaaccccagcacctactgtggcagcctgtttttctcgtctttctttctaaagcacccactctcacccaagtacctgctctcccaggtccatgcaccacctaaagccaaagcccacgttcacattttgatctctagcctgggcctctcccaatgccccttaaaccaccccctcaaaatttccacatggccgtcggaggggcaggcaccctagagtgactatgccgcacgtccagcgccccatcctcaatgccgctcctgcccaccttgcaaaacaaacacggggctcccactgccccacggcaccgtgtccaaacctcgaagccctgccttgcactccagtggccgccctgctgcctctgcccagggacagcccccagcagctgccacagcagctcccccagttcaacacagcgcccccacccgctgccctcggaggtcccatcattcctcacgttgtgagtgccgcttcacttctcaaagagacttttgtgactatccccactgaggcactgagccttctggcccaccgccacggttccccaccttttcttctaagaatggccaatgctgaaaggagccaactcctctatctacacgcttgccacctgcttgtttccaccaagatgcaactgagcgaggacagtggtggcctctcgtgcctggccctcctccagagggctgcacaccacatctcctatggctgcagcagcgtcatctaaacccctctgctcactggacatttgttaccaatgcaaaaggaaaaaaaggcaggaaaacggccggtaatgggcacagaacccgcagagtcctggggtggacactggttgctccaagccgagaactgcccggaaagagatggttttggccaggccactaactgagtcctgatgggcccaccagcctctcagcctcacacccttgcacactcgtccctctaacttcccatgcttccgattccaggcacagcttgcaaaattaaaaagaaataacctatattggtaatacacagaatactcctttcttcttcaacagaatacatcctatgtcactgaaaacattcaaccattaaatgggacagagatggagtcatgctttcaaagagacttggacgaaggaagaaaaatcacatctccccaactctgctccactgggtaaagcctgcagccccaggcagccacacctggagtcccgcatacctgcatcccccaggagtccgggctccatctccatgccctcctgctgctggtagaagttttcatagaagttctgggctggcgggatagggggcatcattccagaatgtggggagtctccagggccgtagggcatcattggagggccgccagggcccatgggtgggccaggattcatgccagggcccatcggcatgtctgcgtgcatgtctgcgtgcatgtcagggtgcatgtccgggtgcatgtcggggtgcatgtcaggatgcattggaccgcccattggccctgggggtcccatgttgggcccagggcccattggccctgggggtccaccgggtccagggaacctagaagagggaaaaggtgcctgtgacggaagctgccgaggagggcagtggccacaccccagaggagaggcggagggctgcagagccgaaggtcatgggccccagaccaggactcccacagctggggagagaggcaggactctcccacagccaggcttgccctaacaagaggagcctggctgggcccaggacagcgcccactgcctgtcacgggggtccagggcactcacctcacacccagcttctcagccagctgtcccgtgggccgcaccacgatctcaaacaaggaggggatcttcttgttgtacatgtcctgctgctgcagctgctgcggggacagtggctcatgcaccggcatgggcatctgagggggcccgggcggtgggggagggggagggggcgggggcggggggccaccctgcatgggcctgccgttgggagaggttggagcctgcgggccagggggccgaggaggggtgggcaggaggcccacaccagggggcggtttgggcagggggttgatgccctgcttcttcagttcctccacctccttctcatcctcggcacctgcttctgcatcatcggccaacatctgcgggtgtgaaagaacaaaagaaggtgtggacggggtcaggatggaaacggacctctccaggtctgagagctgaagtttatgaggaaaagtccataatacaaggaccttgagatctaaaggcataaagaccacaatggctctgtaacaaaaatcatcatcagccacctctctgctccactctcggggaccagctggtagagggggggccattcctgctctatggcaaaatacacataacaaagcatactgtttaaccatttaaagtgaacgattcagctgggcgcagggactcacatctgtaatcccagcactttgggaggccgaggtgggtggatcacttgaggccaggagttcaagaccagtctggccaacatggcaaaaccccatctctactaaaaatacaaaaattagccaggcatggtagtgcacgcctgtagtctcagctactcgggaggctgaagcaggagaatcacttgaacatgggaggcagaagctgcagtgagccaagatcgcaccactgcaccccagcatggacaacagaggagactctgtctcaaaaataaataaataatgccagacgtggtggctcatgcttgtaatcccagcactttggcaggctgaggtgggcagatcacctgaggtcaggagtttgaggccagcctggccaacatggtgaaaccccatctctactaaaaatacaaaaaaaatagccgggcatggtggtgggcacctgtaatcccagctactcaggaggctgaggcagaagaatcgcttgaacctgggaggcggaggttccagtgagccgagatcacactactgcactccagcctgagcgacagagccagactccatctcaaaaaacaaaaacaaaacaaagtgaacgatgcagtggcatttggcacattaacaatgttatgtaaccgccacctctatatagttccagcacattttcatcacccccaaaagagaccctgtacacactaagcaatcgctccccaccctctacccccagcccccggcagccactctgctttccgtctctgcggacctgcccctgctggacagctcctgcgaacagactcatgcgctgtgtgcgatgggcgctttcacttagcaaagtgcatctatctacaacactgctacatctatcagtatgtcactctgttttttatggctgaatcatattcccctgtcatgtttggattttaagggcctctgatctcaactcctgaccatgacccttagggcctaagagcaggggtgggtgtctgggtgtctaggtatctggggacgactgggtagcttcctggcagcttcatttcctcccacgatcccgactcctccaccccaaccacccagcctcgtttcagtgcaatgagcagccaagctctcccctacagggccaggaccagcttcccccaggtttttatttttcctgttattcccatgtggctcaacgtcactcaactgttgaggtccctcattagatgtcaattcatagtgtctgtccagtctcctgtattcactactgggtcaccaggagttctctgccaacactgcctatgccttgtcggattattcagtcattcccatgttcatcctggctcaacctccccatcaactccaagagggcaggactgtttcttccctgctatatccccagggcccccacgagacctgatacagggcagacgcccagtgagtgaatgagaaatgtcaaaatctcaactggactagaatgtctcatcagttaggatagcgtgcagaaaagtgacacaggaggcctggctgctctccttggaaggcctgcttgcaaggctaggcctcggctggtgtctgggaagctgcattttgggagggctcccagcattcactgtccagtaagaggggctcactgcatctaaactgtttctgcaaccaatgcagtttgtgctgaatgcctgctttgccccccaaatctggaattttggtccatgctgggcagaggctgcctaggtgagcagcctagtgaaaaccctgggcgctgagcaagtctcctcgcagacagcatgccactcgtgctgtcacaactggaggagggcagcgtggcccctgcgagtccacaggaagaggatgcgcctgcttcctccaggcgccctcatgtactcattcccagggctgagtttgcctgtgtcccttcaccgcagttaacatcttggccgtgagtcccccagcaagttgctctgggtcatcttggggaccccagcacagatcccttagttggtcctaacacagggtcatcaagataaactagtcctgcccctctgcccaggaacagcaaggcggacagaaacaggaccccctggtgggggttgtgcattcgcagttttcccttctcctagccattagcaatggtatctggaccctggaaccccagggtccaataagaatgtggcttcatggaggaggtgtggaaaacgacgcggtggaacccctctgtccttctgaaccctgatattccaggggtggtcagcgtgtgaaccagcagcacagggggacccgtggaggcagaacccgcattctgccctttgagcgtgggcaccaccacctgagatgagccttgctgggagggcccagagccttgcgccagctgctttcaacactgccacgggctcacttcctcctggcccaagggcccttcctcaactgtgtgtggggccatggcttgcgctgcagctgccaccctgcatctccctcctcctcctcctcttcagtccccactgccgcacatcctggggccgccagtgtcacctcctcacaaagcctcttgaatgtctgcctcctgaatagagcccagctagagtcctgggctcccacacttattcttcacggcctgatccccacgtgtgtgtgcgcacacacacatacacacacacactcacactccccatgtgtcatcagcatccgcccaaggacctaaccctgcctcctcagcacccccagtgcctggcacaaacaaggcacagagatttattgagtgaacgactaagcaaggaacacaaaccaatgcattccctggaatccagaggctgggtccagtgcagaggagaaaggagctcaggccctgaatggttgactccaccatggagtcaactgcggagtcaacccaaactgcccatcggtcctgccagcacagaccctgtggagggcacctctgtccctggcccctccaccagcaaagacaccagctgagacaactagcaccccgctaggtgccaaaacctctctagccaggacagactatcagtgatcacagtttccaacagtcagtcaccttctgcaagcaataagtaacacttgtagaggtgcagaggcatgtgggctgagccccattaggccatgtgaataagctccaggccactggtcaccaacgctgttgcctcgaactggaaacaactcaaatgtccttcaacggatgactggataaacaaacacagatcatccgctcagtgggacactacacagcaacaaatggtaatgaactgttacttgcaacaacgggtgaacctcaaaggcttcatgccaagtgcaagaagccagactcaacacatgcacgcgtgcgcgcgcgcgcacacacacacacacacacactcacactcttaaagcctgtttaccccataattctatttatatgatttgcttgaaaaagcaaaaccaaaagacagaccctgatccacggttgccaggcactggagatgtggggtggcatttactataaaggacacagcagagtttctggggtgatggaatgggtttcctagatccatcttgtggggtggtgacatgactcaatgtgtttgtcaaaactcatagaaccaggccaagcgcagtggctcacgcctgtaatcccagcactttgggaggacgaggtaggtggattacgaggtcaggagttcaagaccagcctgaccaagatggtgaaaccttatctctactaaaaatacaaaaatattagctggccgggcgcagtggctcacacctgtaatcccagcactttggaaggcagagccgagcagatcacgaggtcaggagttcgagaccagcctgatcaacatggtgaaaccctgtctctactaaatatataaaaattagccgggcgtggtggcacacacctgtaatcccagctactcaggaggctgaggcaggagaatcgcttgaacctgggaggcggaaactacagtgagccaaggttgcaccactgcactccagcctgggtgacagagcaagactccgtctcaaaaaaaaattttttcaaaaaaacattagctggatgtggtggcgggcctctgtaatcccagctactcaagaggcagagaactgcttgaacctgggaggcggaggttgcagtgagccaacactgcactactgcactccagcctggacgacagagcgagattccgtcttggaaaaaaaaaacaactcacagaactatatatcaggtgcggtggttcatgcctgtaatcccagcactttgggaggcctgcgggtggatcacctgaggtcaggtgttcgagaccagcctggctaacatggtgaaaccctgtctctactaaaaatacaaaaattagccaggcgtgtgtcaggcacctgtaatcccatctattcaggaggctgagacaggagaatcacttgaacccaggaggcggaggttgcagtgagccgagatcgcatcattgcactccagccttggcaacaagagtgaaactccgtcttaaaaaaaaaaaaaaactggtaccaaagaggacacacaaaaacatagataaaatgctaagaactgcttaaagcactcagataaatttagaaggtatggattctcagctaggcatggtggctcacgcccgttatcccagcactgtgggaggccaaggcgggcgtggatcacctgaggttgggagttcgagaccagcctgacaaacgtggagaaaccccgtccctactaaaaacacaaaaaatgagccgggcgtgatggcacatgcctgtaatctcagctactcaggaggctgaggcaggagaatcgcttgaacctgggaggcggaggtcgtggtgagccaagatcgcgccactgtgctccagcctgggcaacaagagcaaaactccgtctcaaacaaaaaaaaaaaaaaaaaagaaggtatggattttcaggaaaaaggtctgtgtgcatactccaaagcagaaatctacaaccctctaagttttgcaaacatcaagttttgctttcagaaaatattgctctctacagaatttacttttaacggactcaagtaccattatacttaatctctgttggcttcacaggtgcccacttccatgaagccaagggagatcaaatataatcccaatgccacttaaaaaattttttttccagccgttgaaactacatacaaaaagcccccctaaactatctctatttttttcattattttttattatttcctaaaattatgtttggcgataaatgagatatattgttaaaattaatttcacgaggtaggtggcttatttcaggtcaggagtttgaaaccagcctggccaacatgataaaacctcatctctactaaaaatacaaaaattagccaggcacggacgggcatggtggctcacacctgtaatcccggcactttgggaggccaaggcaggagaatcgcttgaacccaggaggcggaggttgcagtgagccgagaccacgcccactgcactccagcctggcaacagagcgagactccgtttcaaaaaaaacaaaaaattagccaggcgcattggtgcacacctgtaaccccagcactttgggaggccggggcgggtggatcacctgtcgaggtgggtggatcaggaattcgagaccagcctggccaacatggtgaaaccctgtctctactaagaatacaaaactaatcacgaatttgagaccagcctggccaacagggtgaaaccctgtctctactaaaaatacaaaactcagctgggcatggtggctggcacctgtaatcccagctactcaggaggctgaaacaggaaatcacttgaacctggaaggcagaggttgcagtgagccgagatggtgccattgcacttcagcctgggcgaaagagtgaaactccgtctcaaaaacaaacaaacaaaaattagccgggtgtggtggtgggcgcctgtaatcccagctactgtggaggctgaggcaggagaatcgcttgaacccagaaggcgaaggttgcggtgagcagagatcgcgccattgcactccagcctggacaacaaagcaagactccatttcatttccatttttttttttttgagacagagtctcgctcttgttgcccaggctggagtgcaatggcacgatctcagctcaccgcaaccaccgcctcccgggttcaagcgattctcctgcctcagcctctcgagtagctgggattacaggtatgcaccaccttgcctggctaattctgtatttttagtagagatggggtttctccatgttggtcaggctggtcttgaattcccaacctcaggtgatccgtctgcctcggcatcccacagtgggggggttacaggagtgagccactgcgcctggccagacgccacttcaaaaaagaaaaaaaaagtaatttcacctgtttctttttacttttttttttttttttaatgtggctactggaaaattttaaatgaatgatgtgattctgtggtgctcctgtgggcagcactggcctgaagcacaaacctggagcctccagcagggggcagtcctcagtcagagatcagtgagtcctcccaaggagccgtgaggcctgactggccactgcttcccctgtcaaacagctcagaccctaggtatgtactgattacataaccctggggcatgccaggcgctgtggctcacacttgtaatcccagcgatttgggaggccaaggtgggcggatcacaaggtcagtagttcgagaccaacctggccaacatggtgaaaccccgtctctactgaaaatagctgggcgcagcggcatgcgcctgtagtcccagctactcgggaggctgaggcaggacaaacgcttgaacccaggaggtagaggttgcagggagccgagattgtgccactgcactccagcctgggtgacagagtgagactctgtatcaaaaaacaaacaaaacaaaaaaaccctagggcagcaggctccccggagggacttgccttttcctacaggcgccctgccaacgaggaatggacattctcctacgtctgcttgcatggggcttcccctgcacccctcacaggggtgcccctgccaccagttaacaagacagtcactgacagatggactctggaagccggcagatgtgctgatgccttgatcctttccactgtcaaaaaaaatagccaatctcctagaacctccttgtgaactagaaggcaggaaagcttcatttgaaagggcaccagttcccgtacccactcactccccagatgaatcaggaaactcaggactgatgtttgggtatttaaccctaacccaaggtcctcagcctgactcctcagggaggacaactgatgccaggatgagtttcaaatgtcacctggctagtggggaagccctgacacctcccccaagggagccttcccctttagagacccccaacttccctctattttctctaatgcataatgggggccctgagagttgcaaagaaacgtttgacttttccaccaaaatacaatccttgcctcgtctttgtgtatctttggttttttgtggtctttcttggagatggcgtcttgctctgttacccaggctggagtgcagtggcatgatcatggctcactgcagcctcaatctcctggactcaacagatcctcccacctcagcctctcgagtagctgggaccataggcatgtgccacaatacctggctaattttttttttttttttgagacacagtctcactctgttgcacaggctggatggaatgcagtggtgtgatctcagctcactgcaacctctgcctcctaagtagctgggactacacgcatgtgccaccacaactagctaatttttatatttttagtagcaatgaggttttgccatgttggccaggcaggtcttgagaacctggcctcaggtgatctgcccgcctcagactcccacagtgctgagattacaagcgtgagccaccacactcggttaagttttttgtattttttttttaagagacggggttttgccatgttgccctaagtacaactgatctgcctgccttggcctcccaaagtgctgggattacaggcataaaccactgcacccagcccagccaattttttttaatttatttttagtagaaacaacgtcttgctacatgcctaggctggtcttgaactcctgagctcaactgatcctcctgcctcggcctcccaaagtgctggggttacaggtgattcgtgtatctttgtgtattgtgagctctctctaaatgacacctaagagatcacgattcatgcttggaggcccatcaggcagcattcctttcatttggtcatgccccaggggaaacagcaaaagcttgtcctggcctaagacaacacatgtgaccacctcaactccttgcagaagaggacacagtgcccgtgtcctccttagaatggcccaattccagatcaaccaaactgggcactgcagaggctggacaggcaggccacagcactgaggcaatggagtgcgcatgtcccagttcctgtagccgggggccccgttacccccggacattaccttatccaagagctccctcgtctcttcggtcagagggtcgtgggaaaacatgcagtcgtcaccattgatgcagttcccagtggtgtggtacagcttacacgggaaatcacgttcatggcaaattaaggtaaatgcttcatctcacagaacgcccccctcccccaccacagacccaaggcagaatccagctccctttgttttggagataagaaatctgagcccagagaggtgaggcgatgtgctaagggctgctcagtgggttggcaggaaatccacggagagaccccggcactccagactgcagggcacttccagccccactacactggctgggggctgcgtcctcagatggtcaaccagactagggaagttaaatgactcacccaaggtataaaaccacctggaagaatctcagccaatggtatgggccagtcttgagagcctatgtaaacagaacatgctccatgtgcatctcagtttactccctggaaggatgggaaagacagacccctctgagggcggacgtgagtgttaaatgagatggagactcacagaaagctcttggcacagagagaaagcacagagaaggaagattggctgttactaccaccatcaaggagcagagaagttctgcgccctcattcagaccagatgctggcactaaaggatatcgtgcatataagggcagttctcagctctggcgcaaaatccagtgatgtaaaacttgcacagttctcgcttctttgggagttcgatgtcatggctaaaattacagtggtctccctagaagagaagcaacaaaaacataaggtggtggcgtgggaagctcttgcttacttctgtctgcaaagggaagaaatactgtcactgctggtgcatggaggggccaatgacagaaacgaatcccccttaggaaaggaagacaggtgtaggaagggcaggtcccaaaggctgttgggactaattttttaaatatttttttgtagagacaggtctcactatgttgcccaggctggtctcaaactcctgggttcaagtgatcctcccactttggcctcccaaagcgctgggattatagccatgagccaccaagcctgggtacttcctgaatttaaagaaaagccttttgtccatttttcttcctcccagaccttggatgtgatgctcggaggcacagcaaccaccgtgtaaccatgaggacaaaagccatatgtttaaagatggcagaatagtaagcaggaatgagcctaggtcccccagggtacccctgaccactgcgctgccagctactgcccacccagctccagactcctggttctgagagacaaatgtctatgtgttgaagccaattttgttaagttttcctttatttccggttgaacacagtctcaacgacacaatacctaggtgaaatccaggattgtgttctccattcttcatcattcagtcctcaggaatcactcaccataaccgtgaactgaagacagaagctgatctgtcccccttttacgaatgcctattcatttgtcttaatttatttacttatttttgagacagagtctggctctgtcgcccaggctggagtgcaatggcacgatcttgactcactgcaacctccaccacccaggttcaagcgattctcctgcctcagcgtcccaagtagctgggaggctgaggaaggagaatggcatgaatccaggaggcagagcttgcagtgaggcagaacttgcagtgaggcgagatcacaccactgcactccagcctgggcgacagagagagactcggtctaaaaaaaattaaaaaaaaaaaaagagagagagagagagagagatggggtctatgttgcccagggtgtattcatttgttcttgcttatatgtatttcaagtttctcaacagaatagaaattgtaactaaataagaaatactgcccgggcacggtagctcacatttgtaatcccagcacttcaggaggctggaatcaggagtttgggaccagcctggccaacatggcgaaaccctgtctctactaaaaatacaaaaattagccgggtgtggtggcgggcaggcacctatagtctcagctactcaggaggctgaggcaggagaatcgcttgatcccaggaggcggaggttgcagtgagccgagatcacgccactgcactccagcctgggtgacagtgagacttggtctcaaaggaaaaaacaaattattttatacacaacattatttgtttgaagcatctatttcttcccaagacagatgcaggggtgcagtgtgccctgagcacacatctgctggtgtctgttgctgcctgggatactggggtaagaagctgccggctgaactaatactgggttattatacttgtttccttcagaactctgtggtcattggtccatcttctgacattgaactctgctatgaagtccaaggttaacctcatcctcccctcctcttctgtttggatgctttaatcattccccattcaaccctgaagctcaataacttcaccaggatatgctgctgctttgcattcacatcaacctccataattacgtttcaggctatatggattggttgaaaattttggccaaaaaattcccctaaaaccaaaagtcctcatcttactgggggtcctcctcactctgaaaggtaacctgagtctttcaggccgcccaggcaactcccagtatcggcaagtgtccacaaggacaaggactacacagtcactcccacccaccctcaccacggctccagaaccttctggaagccatgtgtcctctgggggctatggcctcctagaggtgcccagctttcagcgctccttacccaggtgcagcgcccttccacgaagtacttgcaaatgactttgcctttcttgtccgactgctggtggggcttgtcatggtcacgactccggtagcttccaccaccaccgtcctgcaatggacagggtgtggacgtaaaggggaatgaaagggaagggtagagatgggatcggggttaataagaagcacgggagaaggggatgaggggtcccttcagatctcacaagagcaccgatgggcaggctgcatctaacacggaggctgcgtgcaccttataagccccacggtgtggggtgttgctgcctggtgaggaaaagctctagcctttagagctgttagccacttacacctcaagttccacacaactgtgcaggaacacgtccaccacacccagaggtggtggcatgggtctccctgcaaaaccttccagggctaattggatggttcacctagaaccttctgaacctcagagatgtgttaggtatggctgcaggtgctgctaatgacatggttttaaacacagggtctcagcagcagcgcatctccccaggataactctagttgtcgctggttatgctggtcaacactggccagccctttggggggtggctgatggcagcaaggatcagcttcacagaatgactcattaaagggaaaaaggactaagaagggaccttggcccaaacatcagatcagagtggagtcaactcacgcccatgtcctcgtcatagaagtcttcgtcatcgttcattccgcccttgttcatccctcctcggctgccacctcggcctcggccccgacccattcctttccctcgacctcgggagcccctgccacggcctcgacttagccctgtggaggggagattgtgtgaagacctgctgaccaccccctcccccacccccaggactagattccagcagctgctggaatccctgccccacccagcgtgtcctctccaggcccctgcccacctcggcctcggctgtccttggagcggcggtactggttcagctccttggagtactcgtcatagtcgtcgtctcccattggctcctcactctctccatactggaatgcgcagaggagagggcaggagagcgtcaggtagggaacaatgaacactgtccccacctacacactgctcctttttgaaggatggtgaccatccaggggactcataccataacccgtttccacacagcctgacgacaggtggtcccaatccttcccactgcagtcttcactgtgaagacctgacccaataggcaaacccagcatggagcctccctacgtacacatcactgtggggctctaaaagggagtgggcagtggactgtggactggcgtggaaggtctgtgggtaggaccaggatggcaagtgcagtgcacctgccgctcctcctcctgggtcgggacagggatgaaggaccacgtgcctggctggaaatgtctctagaggactttcaggaaacttctctctagtgatgggatgttttcacagcacatcctgtgatacttcttctttttctttttttgagacagagtcttgctctgtcgcctaggctggagtgcagtggtgcgatctcggctcactgcaacctccacctcccgggttcaagtgattctcctgcctcagactcctgcatgaatagctgggactacaggcgcgtgctaccacacccggctaattttttgtatttttagtagagacagggtttcaccgtgttagccaggatggtctccatctcctgacctcgtgatccacctgcctcaggctcccaaagtactgggattacaggtgtgagccaccgcgcccagccgataccttttctactttaaaccacgtgaaggttttatctattccaaaatgataaatgaatatttttaaacacatacatctgcgctctgaggcttcccttccttcagaagggccgtatgtcttcctaccttggcctcacagcctctaccagcagtgctcacgccccggaaagcccaccagcctcaccccgacgtccccagggccagaggaaaccttacgtccatctcttcctcgtagaaatcctcttcatcctccgggtggtctcctcccatagagcctctgcccctgcctcggctgcccctgcccatgccgcggcctcgcgatcctccacggcttcctcggcccctgtagccccggccccggcctcggctgcctgcatggagattcagatagtgagcctccagcaggagcagatgccaccagcaagaaagaagacaacccacattttgctcctgaggtcaatcacttcagctgcctcctcctccttctcctcctcctcctcctccaagaagccttcctagatgccccaggtaggctactggaccctctggttctctcaatgggggtccctcagcaccccagacacacagctactccagtactcactccccttcctcacagggacttgtctacttagaactgcactgtccaatatggcaaacaccagcccatgggctaatgtgcaactaacacgtctggtccaaactacaagatgctagccttgaagtctgacaagacaagctagccctgtagtttggacctgtgatttagacaagactccaaaacacacattggacttcaaagacttagttaaaaaaaaaaaaaagaggctgggtgtggtggctcatgcctgtaatcccagcactctcggaggctgaggtgggcagatcaccttaggtcaggagtttgagaccatcctggccaacatggtgaaatcttgtttctactaaaaatagaaaaattagccaggtgtggtggcgcacacctgtaatcccagttactcaggaggctcaggtgggagaattgcttgaacccgggaggcagaggctgcagtaagctgagaatgcgccactgcactccagcttgggcaacagagtgagaccccgtctctcacacacacacacacacacacaaaaaaaaacccaaatgagaaagaatataaaatatctcatttgtctaatttgattacacgttgaagtaagattttaaacatattaggttgaaaacagattatcaaaattaatttaattggtttcacttttttcttcacttaaaaaaaaaaagagtggccaggtgcagtggctcaatcctataatctcagcactttgggaggcccagttgggcagatcacttgagaacaggagttcgaaacaagcctggccaacatagcaaaacctcatccctcatctctactaaaaatacaaaaaattaggccaggcgcagtggttcacacctgtaatcccagcactttgggaggccaaggcgggtggattgcccgagctcaggagttcaagaccagattgggcaacacagtgaaacccatctctactaaaaataaaaaagccaggcatggtggtgcaggcctgtaatcccagctactggagaggctaaggcacgagaattgcttgaacctcggaggcggaggttgcagtgagccaacatggtgccactgcactccagcctgagcgacagagtgagactctgtctcaaaaaaaataaataaataggctgggcgcggtggctcacgcctgtaatcccaacactttgggaggctgaggcgggcggatcacgaagtcaggagatcgagaccatcctggctaacatggtgaaacctcatctctactaaaactacaaaaaattagccgggcgtggcggcaagcacctgtagtcccagctactcaggaggctgaggcaggagaatggcatgaacccgggaagcggaggttgcagtgagtcaaaattgtgccactgcactgcagactgggcaacagagcgagactccatctcaaataaataaataaataaataagctgggtgtggtggcacatgcctgtaatcccagttacttgcgggagtaaggcacaagaattgcttgaacccagccaggcgcagtggctcacgcctgtaatcccagcactttgggaggccgaggtaggcggatcacgaggtcgagagatcgagaccaccctggtcaccaacatggtgaaaccccatctctactaaaaatacaaaaaaagccgggcatggtggtaggcgcctgtaatcccagctacttgggaggctgaggcaggagaatcgcttgacctctggaggcagaggttgcagtgagccgagatcgcgccattgcactccagcctgggcaaaaagtgaaactctgtctcaaaaaaaaaagaaagaattgcttcaacccaggaggcacagggtagaggctgcagtgagcctaaatcgtgccactgcactccaggatgggtgacagagcaagattctgtctcccaataaacaaaaaagagtgatgggatctcgctgtgttgcccaggctggcctccaactcccgggctcaagtgattctcctgcctccacctctcaagtagctgggactatccagtgtccttttcactttttaaatgtggctaccagaaaatataaacgacatggtggcttccaatctatttctacttgacagcactggcctaggatctccccaaagcacaggggctgccccagggaggtatccaagaaagactgctagaagaaccaatgggccgggcgcggtggctcacgcctgtaatcccagcactttgggaggccgaggtgggcagatcacgaggtcacgagatcgagaccagcctgaccaacatggtgaaactccgtctctactaaaaatacaaaaactagctgggtgtagtggcacgtgcctgtaatcccagctactcaggaggctgaggcagaagaattgcttgaacccggaaagcagaggttgcagtgagccgagatcgcgccactgcactccagcctggcgacagagcaagactccgtctcaaaaaaaaaaaaaaaaaaaaaaaaaagaatgaatgaacagctactcaacaagctgggcctcaggcagggctcacaagtctgagaacccctgcactggaagattccagaagccattctcaggctgggcagtctttctggcaggagatggttcaatggttctttttggttgctgttgttggtcaggctggtctcgaactcctgaccttaggtgatccgacagcctcggcctcccaaagtgctgggattacaggcatgggccactgcgccggcagagatgtgttctaagaggccagtcagggctaccgtgtctctggtgctcaagcctcctccaccttcctcccaaaggacacaggttcaaggttcagaggtgtggcagtggcaaggactgcagtcacactttgtcaggtgatggggctgggagaatgggggagcactgctgtggggtgtggcagccagctgtcagtgaccatggcccaggtgaaagagaagctgttcccttctccccccacagctgaccaggaagtgacctttcgggcacgctggccttctccctgcctcacaccagcctggtaccaccccaaccacagcccagcgggtgatctctccggtctcctgtgccatgcacatgcagagcctggcccttctttgtacacttatcccaaccctaagtgaccaaacttgaggttctgtgagaccaggccaccggggttggcccgggtggctccgatgccccagaggagaaactgtaagggcagggctcacctcggccgcggctgctgccctccttggcacgccggtactggttcagctctttggtgaagtcgtcatagtcctccttgcccatgtcctcctcctcgtcgccctcatattccccatactgctcattctcgtagtcctcgtacatgccataactcttgctgtccatcttggagtatgccttcttgggcaggggcgtggcatgcgatggggggtactgctggtgggactgcgtcccagagatggggaaaagaggtgagccggatcccacagccgtgggtgcagactaccaagatacccagggttccctaaacgaacatgtctgtctgggtgtcactactgtcccagggttgcactgctggtctccagcccctctggggactggttctcgtaccagggagtgggagtagcagcgggcccaagtgtttctgttcttcataaagggccagaactagaaagaaaacagaaccacagacccccgatccctgatgaacaaaggggagaagaagggagcatttcccaaggatgcagagcaagcgcacgtggaggggcctgggaagcaggcgggggctgcttggtcacaattttcctagggccctggaattcaataaatggcctgcttggcagccaggctggacagccatctcaaatgatgctttccaaagtgtggtaatgccaagtggtactagaagaagttaaagatactcataaaaacggaagcaaccaagacatccttcaacaggtaaatggataacaaactggtatatccagacaatggagtaacgacgaatatgtaacaataaagtgtgtattgggcaaaacccagagaactatacaaccctaagtaataacaatgtatcaataccggctcatcaattctaacaaagttaccacaacaatgcaagacattggtaatgggaaactggaggcagggaagggggcaggcagaggggagaagggaactctactactacctgctcaattttgaataaacttaaaacagctctaaaaaagaaagtcagggggctgggcgcggtggctcatgcctgtaatcccagcactttgggaggccgaggcgggcagatcacaaggtcaggagatgcagacgcgaaatgcgatctctactaaaaatgcaaaaatgcaacaacaacaacaacaacaaaatagccgagtgtggggcaggcacctgtaatcccagctacttgagaggctgaggcaggagaattgcttgaacccgcgaggcagaggttgtagtgagcagagactgcaccactgcactccaaccagggtgacacagcgaaacaacaactcaaaaaaattaaaataaagtccgggcacagtagctcacacctgtaatcccagcactgtgggaggcccaggcaggcagatctcttgaggtcaggagttccagaccagcctggccaacatggtgaaacccagtctctactaaaaatacaaaatgaattagccgggcatggtgatgggcgcctctaatcccagctactcgggagactgaggtgtgagaatcacttgaacccgggaggcagaggatgcggtgaggcaagattgcgccactgcactccagcctgggcgacagagcgagactctgtctcaaaaaataattaaaattaaaaaaaaaaagttgggccaagcgtggtagctcacgcctgtaatcccagcactttcggaggcaaaggcaggcagatcacaaagtcaggagttcgagaccagcctggccaacatagtgaaaccccgtctctactaaaaatacaaaaaaaaaaaatttgccaggtgtggtggtgggcgcctgtaatcccagctacttgagaggctgaggcaggagaatcgcttgaaccagggaggcggaggttgcagtgagccgagattgtgccactgcactccagcttgggcgacagagcgagactccatctctaaataaatgaatgaatgaacgcataaaaaagtcggctgcgcatggtggctcatgtctgcaatccccgcactttgggaggccgaggtgggcagatcatttgaccccaggaatttgagaccagcctgggcaacattttgaaaccccatctctaccaaaagtacaaaaattagccttggcgttatggcccatggttccagctacttaggaggctgaggcaggaagatcacctgagcccagggagctcgaggctgcagtgaggtgagatcacaccactgcactccagcctgggcaacagagtgagatcccatctcaataaacaaacaaacaaacaataaagcccactaattttaaaaaatccgaattatagaaaaacaggacaatgcaaaatacagctagacacacagacacacatacaagtactttagcagatctttaaaatgcctccagctctagttcataaaaagcacgcaatgttccctccatttcctgcctccctcaggtttgaaggccaaacctacaccagtagatcaatctcaactatggtattggacaatgaatcatttgttgtgatggatgatgctgggtcatgggatacctgggacagctttaaagacctactaactttaaaacatttctcaaccagccgggcacggtggctctcgcctgtaaccctagcactgtgggaggccaaggcgggcgggtcacctgaggtcaggagttcgaggccagcctggccaacatcgtgaaaccctgtctctactaaaaatacaaaaatcagccgggcaaggtggcacatgcctgtaatcccagctactcgggaggctgagacaggagaatcgcttgaaccagagaggtggaagttgcagtgaaccgagattgccccactgcactccagcctaggcgacagagcaagactccgtctcaataaataaataaataaataaataaataaataaacaaacaagacaaaacatttctcatccaaacccggacacccacgtgccaacgaatactgggtaaagtaatcataagatgatttgcggccgggcgcggtggctcacacctgtaatcccagcactttgagaggccgaggcaggcggatcacgaggtcaggagatggagaccatcctggctaagacggtgaaatcctgtctctactaaaaacacaaaaacttggccgggagtggtggcgggtgcctgtagtcccagctactcaggatgctgaagcagaagaatggtgcgaccccaggagacagagcttgcagtgagctgagattgcaccactgtactccagcctgggcgacagagtgagactctgcctcaaaaaaaaaaaaaaaaaaaaaaaaatgatttgcttttctcttatgggattttctgggggaagaaatggtatacaaactgaacaaataatttaaattgctgcttgaaatgagagcgacagtggctgagtatctaacctctgcctactggctacttgagaacatttcattctcttgccaatttcccaaaaaggtcatttgtgaacagtggaagccagtcagccgtgacgtggaccagtcagcatctttctctgagacatacagggccttgctaaggccgcatggaggaggctcgagaacatgcctcatggaggtcagctagggcctgggttcaaatcccagctcctttacttcagagagctgggcaaccctgttgaaattttcttttccttttgagacaggatcttgctctgtctgtcacccaggctagagtacagtggctgatcatagctcactgcaaccttaaacttctgggctcaagggatcttctcacctctgcctcctgagtagctggaactacaggcatgcctggttaatttttttattttttgtggggtctcacttggttgtctgggctgccttgttgaaattgtctaagtttcagtttcctcactcataaaatggggattaaattaatacctgatggcccaggactgaaactcacaaaaaatgcccagaacacagcaagtgctcaagaaacacaagcagttgaactcctcccggccccagagctcagcagtgcatgccagtcactcaccggcgcatatggggggctgtactctctgtacttgcggtgacctttctcactggggctgaaatccgagtcatctgagaagtcagagaagtcatcgctagaagaagcatggcgctgtaatgacaggggaaggagactcagcaacctgccacaggcaggccactcgggcacagtcagcctcaggacaaactatgctggcatgtgccgcagggctctgcgcttcacctgaaacacctcacctggggcacttagtggcaatgaagcataagctaccaactcttttaaaaaaggtctttatccaatttgagataagcaaaggcattaagagtgccctctggggtggacagcaaaagctcagcccctggggctctcagccaggcccaatgccaggcagtggcagtcccaggggatctccgacctactttgtgcttggatttcctcctcttcttcgacctccttttctctttctcccgctctttcttccgtttccgcttcagtctcctgtgggacttctcctcatccgaatcactgtgatgcttctcccccttttctttccggcttctctcaggccctccggaggtatcctgggtctcctctgccccatcatcttccaattcaccttcttccaactctccatcttccctacaaacaaaccccaatcccaccatgaacacagggtttgagaggagacctcctagggctctgggctggccaaggctgacaggaaccgaaggcctgactgctgtgagcgaagtgagaccctgggaggacatgggggccatggcctcttgttccatcccttatcctccccctgaaagaactgtgcttgctccagtctaacctggctgggggaggggtaggagtttaagggcattaccactaacaccgggacacatctacgccagatttcccaacagaactagtgttcttagaagaagaaaccgacaaggtgctgtggtcacataagcaggaagagccccatcttggggattcataatgcttaacgctgcacaacttccaggaagccccatagtccagaaacccacacagctctgctgtgaagcacttggggcacttctaaaccttgcttgaccacagaagtctctctcccagggagcacagacccacatcccctccctcccaggcccaggattgcctgctgggccccgggccccagtgagctgggcgtcagtgccacctgaggctgagggcggtggctgtgcaccgtggagagggccttggttctgaaccaggggtggccccaagctacctgggacccacccacaggcaggcctgggctgtggcctgagaaccctccaagtactttattacaaaagccccatgagaaccgctggaaacaggctcagagtcccaggtcacaaggtctgacccaccctcgtcagtcccacacctctaggccggaggcaagcaaacactgagcagctggaggaggggggacggatcccaggcccctcctgagggcctcacatgataccggccctgctttctctccctcctctgactcacctccagatagtggaaccccttctggctccccatcctacactcttccaattcccccgtgtcaccccaatctccaggactttaaaagtgctctccaaacatgacagacactgcccagtggacattctgcatatgtaaatatctatggggtggggtaggagtgaggaagaaattgggttcaggagggggaggctggaaaaagaatccagtttttgagccaaacccacagacacagtgttcacaagtacaggagttggtaaaggaaaaaaacaatctttttgaataattttaaaaagctcccaaagttccccatgaatgaccacaaaaaggcttgcgtgagagcatccaactccttccgtctcaattaactaggacacaaagagaagtgatgtaaggaggaaacatcacgagcccaggccccaaaaggttagccacaaatggagctatctctgcggaaaggcccgcagctgcccaagcgggagccaatgtattaggcgtgcttgcctgaaggttccagggcatgtggcagactcctcctcccaggaccctccactgtcctttcgcttatgtccctccctttgtctgccttggggctgctacccaaacatcaaggagcgcctcaagagcagctttttctatgaactctcactcccagttcaaaggggatgggttctatttcaaacccaagtggcccagccccacagatacccctgggcagaggtcaagggcaactctcaaaacagaatgcaggacacaaaactctttctgctgcttcaaagtcaacaacacaggtgacctgacccatgtgcaccttgtgttgcttccccgactagcaaacttggaatggggcgggggtgcaggctgcagtcctgacaagggaggtgccttcccgctggggtgcggcccacagaaaccaggcgtggagcaaagtcctcactggacacctcacccacaccgaaaagggccacatgactgggaaaactggttttgtcccaagggagaagctgttactcagtgacatggcaaactgcccgccgccaggagctgtgcagacactgggaggtggcaccctgatgggaatactgggggcaggccagggccacacctcaagagaaagggagagacggacagactgagcgggagaaggcccgggacagactggaggtatacatgctggggttccataaagaaaagctaagaacaacattactctcgacacttaagtctagaagggataaagctgagagggacatgatcaccacccaggccactaatattttaaatgccatatctgtgccaggttgcttgactacctccttttctgcactgacaagaaacttggtccacaaggcaggtgcctgatcatcagggctgggtcagctgagccggagtgggtggcagcctcagcacgccctcccttatgtccaacaccgcggcacagcaggcgacagtcttgcccagggtcagctgaggcctccttccctgtcctgatgccactcgctggctcggacgaaggtacaggctactctacatctaacacctgcgggcagaggacaaaagaccattcaaggaactccaagagccttaaccatcatccagaatgattctagaaaggaatcaccaaggtagagaagtgcagcattcaaattcaccctacaaagacctgagccaaagagggattctgcacattatcgatattaacagctccaggcacatctgggctcaaagagaatcaaccatacaacttttcacaaaacaggcagtgactacttgaaattttgtttccctaaagttgagagaggcagagaaatacataggatttttttgttgttgttaaactgctgacggttgataaaggggcactgagacagcaacaataaacagatcactgcattctcagggccctctggccatgtcaggccctcaagcccctccgagccctgggctaacttctgtccacagtcacctcaaggggtcccccctcacgacacccaagatgctctcctagctaaacgtcctgcgtgaacacgaggtcttgactatattcttcagactctgttcaacagaaagcaaaaagaaaggaagtcgagccaaatgggaatcccgtgggccaccagcgcgacggcacaaaggcggtctcaacaaaacagcaaccaggtttcagcgatgccacttaacagactgccggcaaaatccgtgtcagagtgggattaaatgccaagggaacatgcttaatagacctcgacataatcccccaagaaaagtgggggaagccccaccgcgctaatcatttcaatctagacctgccaaactctcttgagacaagcaagcaggagaaaagcctgccgtggcggcctgtgcagggagcactctattcccagagcctggattggcaacgcctgacatggctgcactcggtccgctgcccagagccctcgggaacaagaaagcaaccaccctgggagaccgacttggaactggcccccatgaggaaatgggaagaggccaacgccttgccttgagccagtcctgccccgtacctcccggacaaagctcccgggtatttcggttcccattttcagcactggctgctcctccccctggtcaaagaacagatctggacgcccactctaaggaacaggccaactccacagggcccacaaggatgctgggttcagcacacaccacggacttggcaaaaacagtgcttggtaaagacatttcatgttcagaccgggtgtggtggctcatgccttcgggaagccaaagcaggcagatcacttgaggtcaggagttcgggaccagcctggccaacacggcaaaaccttgtctctaccagtaatacaaaaattagctgggcgcgatggtgggtgcctgaaattccagctactcaggaggctgaggcacaagaacttgaacctgggaggcagagattgcagtaagccaagattgtgccattgcactccagcttgcgagacagagtgaaactgtgtctcaaaaaaaaaaaaaaaaaaactaatcccagcactttgggaggccaaggcaggcagatcacctgaggtcaggagtttgagactagccttgccaacatggcgaaactccgtctctactaagaatgcaaaaattagaccagtgaagtggtgggtgcctgtagccccagctactcaggaggctgaggtaggagaatcgcttgaacctgggaggcggagattgcagtgagccaagatcgcgccactgcacttcagtctgggtgacagagctagagactcggtttcaaaaaacaaaacaaaacaaaagatatttcatgtccaaagtagacatgatatttcaaaggagatatttcatactgcctcatccagcagcctacagattcgggcctcatgctcctttctgcagaccaagtaactcaaccagctccacctcttctctggagtatgctcttagtctgtaacctgagccttgcttttctgatctactgaatgggataacagcagcacctatctcaagggctgtgaaggttaaatgaaataatagggataaagcccttgacatgaggaacaggcacaaaggaagaagcagctgttggttttaaaaaccagctagcatgagggcatctctccacggaaagccctaactggctggaatgctaagtgggaagcatgttctctataagaaagctacagccagggccgggcgcggtggctcacgtctgtaatcccagcactttgggaggccgaggtgggcggatcacctgaggtcgggagttcaagaccagcctgaccaacatggagaaactccatatctactcaaaatacaaaattagtcgggcttggaagaacacgcctgtaaacccagctactcgggaggctgaggcaggagaatcacttgaacctgggaggcggaggttgcagtgagccaagatcacgccactacactccagcctgggcaacaagagtgaaactccgtctcaaaaaaaaaaaaagaaaaaaagaaagctgcagccagctctccctgacggacactgctgactgctggtcaacaagttctttctacttggtcacaaccacacatacactgttctcccaagccatcctgctgacaaaactgacaaaagcaacatctccccttcctcagctctaatctaggcagtaccagaagccaccaagtggctaatcaagacaaaaaggcgtagggagagctgagccccgggaaggaacaaaggcttcttacagaaatgaagcttggcaacatggcagctctctagacaagagggttggacgaaagctgaaaggggcccagggtttatggatcaacctggtttacaagagtttaaaaaaaaaaaaaaaaaaaaaaaggcaaagtacaacacaaaagatggaaactcatgggaacagcagcggttaccttaagatcatgagagcccttgataagaggcggctaggttaatgtgaaggtcagggttatgatcattaactgcccagactctcaacaaattgcctgggtaggctctgaatgacccattaactagggacaaaatcacaaaaattacaaggaggcgccgcctcttcaaatatttaacaaccagcctaaatgcagaagtccaggatccccaagtccgattctgcggactagtcgtttattaggattgaaggcgcagggcctttgcttcagaaattcagctcagggctcatgccaaagaaaggcccgagaccttcccttgagttaggacgtaatgaagcagccataggggaaacctcacggagggattttcagagccaggaaattcttgaaataaacctctgggtcttgcacatgcttttcagtgtccttactacctaggttcatcaaccagaaaccaagaacaaatgtgctctgtctccttttcttcagcattctcaggtgtcatcatagcctgctctgtgacatcatgccatttccatggtaacgtgcctacgccacggcaaccacccaagtgagacacaaaactggcaaagagaagtccaggcatcagcatctgtaccctgtaccctacaccctcacttcaacataagacagtctacccactgctggcatctagatacgaagacacctactggtggatgtgacgataggagaaattggagccatctgaacccagcctgggtatttgagatattaattgttaatcttgttagaaatgagttttgtagaaaggttttttgttttgttttattgtcttttcttttgagacggggatcttactctgtcgcccaggctggagtgcagtggcgtgatttcggctcactgcaaccttcgcctcctgggttcaagtgattctcattcctcagcctcctgagtactgggattactgacacctgccaccgcgtccagataatttttgtatttttagtagaaacagggtttcgccatgttggccaggctggtctcgaactcctgacctcaggtgatccgcctgcctcagcctcccaaagtgctgggattacaggtgtgagccaacacacgcggcctgtagttatgtttttaaataatcataaagttagagattcatactgaagaatctacaggtataggccagacacagtggctcatgcctgtaatcccagcattttgggaggccaacaggcggatcacttgagccctggaatttgagaccagcctgggcaacatgaggaaaccccatctctacaataaatacaaaacttagcctggcagcatgtgcttgtagtcccagctactcaagaggctaaggcgagaggatcgattcagccaggaggtcgaggctgcagtgagctatgattgcaccactgccctccagcctgggcaacagagtgagaccctgtcagactgcttgagcccaggagttagagaccagcctgggcaacacagttagaccccgtctccacaaataatttaaagacagggtctctctatgttgcccaggctggtcttgaactcttggactaaagcctgccttggccttctcctgccttggcctcccaaagttctgggattagaggcatgagccattgcacccagcctctataaataactaaaaaaaattttttttccataataaaaagttaagaaagaaaaaagttctggccaggtacggtggctcatgccagtaatcccagcactttgggaggctgaggcgggcggatcactagatcaggagttcgagaccagcctgaccaacgtggagaaaccccatctctactaaaaatacaaaaattagctgggcgtggtggcgcacgactgtaatcccagctactcaggaggctgaggcaggagaatcacttgaacctgggaggcagaggttgcaatgagcgatcgcaccactgcactccagcctgggcaacagagcaagactctgtctcgaaaaaaaaaaaaaaaattagccgggcatggtggcacacgcctgtagtcccagctacttgggagactgaggcaggagaattgcttgaacccatgaggtggaggttgcagtaagctgagaccatgccattgcactccagcctgggtgacagattgagacttcgtctcaaaaaaaaagaaaaagaaaacaagaacttccaagtgggacaactcagcaatgtgaggagaggctgcaaggtccccaagcagttatttaataatttcccagcagagagctggaatctgggcttgcaggcctccacactcctcaccaaggcctaaacaggctcagagacaagaaggaatttgcccatggggtcacagcaggaagaagcagaactagaaactaagtccagtacttttggatgcaaagaccagctcttaacctctacaaattatttgacaactacaaattatgtcaaaaagagtaatttgctaaacaggtcaactgacaaaacaacgcccaccctgaaatgtataatcgagtagggaaaaataagatatacatacataaaacagacttcatgaatcagtattccaagaaatgccagaatgaggtaccaagactttgggcaaattccttaaacactctgcaccccagtctccataactgtgcagcacaggcaaccatggagtccccaggatggtgtcatgggagaatcccatgaggccatgtaacacaagcacttagcaggaaccttgcccagaataaatgcttaggagtaaaacctacccaaacacaaagacacaaggccgatacggtccttccaatatcaagtgaaggaaatggtagcatttcaaaaacctaaccaaagacatctggatagagaataagggctcatggaaagaccgaaggaattctggcaaaaaaaaaaaaaaaataggactcatcccaacacaaagagaaagcaatacaaaaatcccagggagtgaaattccaaagtcccctaatatgaaacgaatgccttcgcccccaagtgtgcagtgtccactctggggtttgtccaagcatgcaaaccacttaggcagaacatttctgtaaagcttcaaacaggctgaccgtgaaaaaacccagcctgctaaaaggaagcttgtggagacaaagatgccattttttttgcctgagtatctattcttccactcccacgagctctgaaaatttgcattcttgagcaaaggtatctatccctcagatccaagttactcctggcagatgaacctctggaatttgcttctcagcaatgaagagttttctaaccaccttctcatgccaactaagcttcagatggtttaaagctgcaaagatcatggttttcatcagaggaccgatttctatcactccagaggagaaagtctaataatttaacttatgaactaagacttctctttgtttataattatttatttatttatttctacacagggtcttgctctgtcacccaggctggagtgcagtggtgtgatcattggttcaatgcagccttgatctcctgggctcaagcaatcttcccacgtcagcctcccaagtagatgggactacaagcatgcaccaccatgcccagctaatttttgtattttttgtagagacagggtttcaggccgggcgcagtggctcatacctgtaatctcattactttgggaggacaaggcaggcagatcacttgagatcaggagttcgagaccagcctggccaacatggtaaaaccctgtctccactaaaaatataaaaatcagcccgttggccgggcacagtggctcatgcctgtaatcccagcactttgggaggacgaggcgggcggatcacgaggtcaggagatttagaccatctgggctaacatggtgaaaccccgtctctactaaaaaaaaaaaaaaaaaaaaactacaaaaaaataagccaggcgtggtggcaggcgcctgtagtcccagctactcaggaggctgaggcaggagaatggcatgaacccgggaggcagagcttgcagtgagctgaaatcgtgccactgcactccggcctgggtgaaagagcgagactccgtcttaaaaaatatgtaaaaataaaaataaacaaataaataagagatctgggcctaagattcttgagatttgttcatataccacctaaagaatttcttagccaggcgcagtggctcacgcctgtaatcccagcactttgggaggccaagacaggtggatcacctgaggtcagtagttcaagaccagcctggccaacatggtaaaaccccatctctactaaaaacacaaaaattagctgggtgtggtggcgcacacctgtaatcccaactactcaggaggctgaggcaggagaatcgcttgaacccaggaggcagaggttgcagtgagctgagatcatgccattgcactccagcctacgtgacagagtaagactctgtctaaaataataataataataatttcttaaaaagaactgatacaacctattcgttaatttctagtcacctgtgggttccttaagggcagacaagaatgaggttcacagtaaccccacatttccaagggcccagcacagggccaggtacagattgggtacatgctcagtgcatattctatatgaagtatcaatctcagctctcatacccttttggtcaatttcatcaatagaaacagtaactaatttccaagaaaactttttcagcaacctgtatcacttaaaactttgacacaaactcattcaagtgtttatcaagggtttccaaataagcttgaaagtgatggatgcacagactgaacagaggagacaggccctgcctcggatgcagcccacccgtgtggcccacaagcttcagttactgtgactgctctcgttccccgtggagtggcagggcctgcctggaatcccaaggaaacctaagccctggtgtctgttaggaaaatgaggagggcaataatccaagccacctgcaacagacttttggccaagcgacactagcgtctgggcccagctccctcggttaggccatagcagggatgtaatggccatgatccacttccacacgggacctcaagaagtctccagttacttctaatgaatgaaaatcccttccatttaagagggtttaaaagcctaggcttgggcctctacattcactgaaaggagtggaacgcagggagaatggagccacagtggactgaggaaacagttaacacccccaccctctcgagggccaactttaaatggaatatctatattccctcctcattccttcccaccacaaaaaaaatgacaatggctgctgtgcaggcataccagacagtgcataccatatcacgtggtgggcagcaactttctactcaactctgctgctgtaacgtagaagcagccactgatgatataaatgaatgagtatggctgtgtgccaataaactttacctactggccaggcgcggtggctcatacctgtaatcctatcactttgggaggccaaggagggtggatcactcgaggtcacgagttcaagaccagcctggccaacacggtgaaaccccatctctactaaaaacacagaaattagctgagcatgtggtgtgcgcctgtaatcccagctactcaggaggctgaagcaggagaatcccttgaaccaggaggcagaggttgcagtgagccaagatcatgccaccgcactccagcctgggtgacagagcaagattctgtctcaaaacaacacaaaccaacaaaaaaacactttacctacaaaaacaggctgggtgggctggctttggcccgagaatcatagtttgccgacccctagcctggatgcaacggctttcacactttttgacactgacccacatctgcttctttgcatttctcccaaacaaaagtttccagaagccacatttaaatgcattctgctttttctctcctcttccatttccttggttttccaatgcaaaagaaaaagatcaataattggacttcatatcccactagtggctataccccacagtctgaaaaatagcacaccagatccaccacagtataatggtatgtatagagatggggtctgagtaccagccaccccgggttctaactctgcctgcagcacacacttgttttgtgacctgggacaagtgacttcacctctctgttttggtttctcctcaaacagcagaggtaaaggttaaatgagctaatgcatgagaagcactcagaagggctctggcagataatctttgaccttcaggtcaattgtgcacaaatggcactgttgccccttcggaaagacaaagacactgacttaggagatgaactcaagaatcacatccagtttgcctaactcccccaaccatagctgtccaccacccatcactctcagcagagggccaatcccgtgtggagagaacatggcagcacccaggcagacatggtggcttatacctgtaatcccagcactttgggaggctgaggtggaggatcattgaagccaagagttcgaggctgcagtgagctattaatactatgaggtgccactgcattccagcctgggcaacagagcaaaaccctgtctcaataaaagagaaaaaacaaagcttttggctctggagttcactctatcctttctgggacaactgacaggcatgaccaggaacctgatgggcctgcctgtgatctagccactgagcctaaccttcaaattaattaaggcatctgctttccaagtgcatattagtaagctgcaagcagcagcagcaaccctttatcgtggccagaaactgtagaaggtaggccagacacagaggaagggaatacgaagcctggtaaaggcagtaacaaccctagcccgactctaaataaagtcttcatgatagaagggttctctgcacactcagaaaactcttgggctccaagaaaagccggggaggaactcagttactgaatgaacaaaaccttatctgactcagccagatcccaaaggagtgaagaatcctggagctggatgagaccttgttcattcccctctggagagagtaaaggacttgcgtggggaaactgactagtttgcagtggtatgagattctagatccctggcttcccagttctcagaagccctactgagactacagcactgactcggactctaattgcaaaagatgaacacaggaggtacagtcagcattaagctccagacagtatgaccatttgagcatccataaaaagacactgagcaagcaagaaatatcttaagatggcttccacttagtgtcaaccccaattggctccctgcaattaaataagctgaccagaaccctaagagatgaaagataaatgcacttccttcaaaaatagatgttattcttacttctgtttatacaccaactgtaaaagttctgtttcaaattcttctctagtagggaaagcaggaagattcactgaatgctggcattgtgtgggtgtccccaaatgcactcatttgaccacaaggaccctgagaagtgggcattttatactcgatgcctactgcacactgccggggagaagccaggcctgaacagttttatctggctccaaagtccacagtcttcctccacatcctgttgccacctccgacattcaaaaagatgtcaccacttgcctgacaaacagggcactgagtcacctattcacacagatgcgaaatggcaaaaaaaatacacgagaaagatcctttatgcagaccagtttggccagaagcagcaaactatgctctcagcaaataatcctgcgttctgttaagaaaaaaaaaaaaaaaaagtaacaggacacaactaaatctagcaccaaccaagaggccgtatcttcatttttgtcaacaactactaagagtcaccccaatgggtgatgtgccagaaatctatttaaaataaactgcctatcgcacctcattacatcaccagtgaaactgtacacaatgtcttcaaaactgcatctgcattaactcctaaaagcaaaagcgttctgcagcaaagacaaggccaagaaactgggagtcaaacccatgaagtttggctccccccaatcaatctcatttttactttaacttatccccatgaacttgacatgccacccagacaaactggcagcttttccatcctattaggttttaattatgaaactggcttcataccatgttattcggagaggagtccctccaccaatgaggctgctcctacagtctctgatctgctgaataaataccaattgccagaaatctcaggagtcatccttttttcttagctgtgctgccaaggcacaggttaagcgcctggctcaattcagctactttgcttgctattcactctgtcactcaactctcggtgtgaatcggacccagttgctctggcactagaattactgttcgtggggaccaaaattaagttctctagaatctggtttgacttgatagctatccacggagacctggaaatagtttcattagcaattttcaccagaggtatttactgtaactggatctgacctctatggagagatgtttctacaggcccaatagccataaaaatgtaacaaaaggaagtgaaggaccctcagacagccatttctctcccatcagggaagaaggtaaaagatctaagagcaagaagcagaggtgtaggcaccgttaaataaattactaaccaggcccaatatgaaattgctctacattcaactgtatggaaacgcaagagtcaaaaccgttcatctttaacttgccaggcagttgaacagccaggtccacaggtacaaaacaattctcccctgggatcagccttcctggctgtggaaaaaccacagcagtggcttactaaaatagctggctctacttagagaaaactatggcttataaagaaatcaaaaatttaaaccttcagagcagagcaaaattgtacctgggggagaggacaggccatgaattagtcattttggggaaccgcatttttttcttttaaagagcaaatttgaggggaattaaaaaaataaaggagttttaaaaaataaaggggttttatgacgagaacatccatatttccatggtcacaacagactttttttctactaggagactttgatttgctttcaagttaaatctctcacccagagaaaataaaaatgtaaaagtttgtaagtgtataataagatttgttattaaatcagggattctgagtgacacccttttctttttttttgcaacatccattaatttgatttttaactaatactggtacatcagtctggggggaaaaaaggcagtactgtgacatttcaaaaacagattaccaaaatacagtttttgacttaattactggggcttctaggtcttaatggatgagatttctttgagaatggaaaacaataaaccgttgtgttgacatgcctgtgagctttttaaatgcttggggaaatagtttcaaattcactgaacattgctaaaaaatttcacttacaaaagaaatctcatttccttaacgtttctttttaaaagtcaatttaaataagcaacttagtagcctttggaacttgggtcatcagtcatccagtttctgttctcagctcctggagaaagaattttacaaaggatgggaaacttcaaataagtgcaattcattttgggctgacccagtgccctggataatgtgttttgttcggttcgtgcttcagacatttcttgcaggatatcgtagtttggagatttcttcctcccgtaactgattttacatacctaggatcaccactctacggcagttgtgaacatattaagaggaagaaaacaagtggcctattgaattgcagtttcctcatctacatgtgcgtgaccttttttccttgtaagaaggaaaaaaacaaaacggttcttttggagagggccagggttctctaagtatgtcagggatcaaaagtgggaaactgggaaaatgcaacttcaacgtgttttgtcttttaacggaacttatgcttgtaaaacacatcagaagtacagtgtttggttctgcaagtcatttctgttgttgttttttccttgttacgtggaggccggggggactgggggctggaggaggtgttccctccaacatgactgggcgtgtaacacgtttgcatcaacttttcacagtcagacatgtgctttcgaacaaaggagcagtggagacaggcagagatgggggcttgacacagtttacagattttgtgcttcaacagtactttacaaatgacttgctcaattttaacgtccatcaccacaagagacattggagtaaaatgagaaaattggagctacttgaaccaatcttttttggggagtgggggggaggggaaccattaatttgaatacctgcatcataaatcaaatccagtaagcttgtctcctacaaatggacttgaagtatccactttcttcaaagatgaaggctggagacaaagcaatggattgaaatggaaagaaggatgccaagggtctgaaaacatacgggccttttacatcgatttttgtcatgttacagtaacacacttttttttctgagaaaactgtgtacgtcaaattttaaaaattaaacattgaaaggatgtgcaagtctaaaagggctcaacagggttagaatcctgattcgaacatatcaattcactctcaagcatcactttggtctaaaggcgaggaggaaggcaggcagtaaagggagaaaaagagggagatcattgaattactcaataaaagaggctacttaccatcccaacccattgtaagacatacacttctgacataagagaactccttagaggtcgaataaagcgtgtaagcacctttgagtaatgcacctgcccccggagagggggcccggaagcccaacgagggcttagcgaacagacctttgctaatctgtttatttccttgaactggagtcgggctgcgatgggctgcgattcccaggacgatacatttaattagaacaaaacagaaaaaaaaaatgttgtaaaagctcaccaaactgctgcacttgtgtctctgaatgtgggtggcatttcttttaaaaggcaaagtatggtctgtgaaggagaaaggggaaaggggaggtgggagtggggagaaggggtcgtacgtacagcctggcaagggaagccctggctgagaccccccggctaaggaagggtcctcagcggctccccagccagggctgcgacggagtagccatctgtccagagcgttctcttcccctctccacccccattccctccaagactcgctttcctgccggctgaaacccaccgtccgtgtccaaacctactctccagccgcctcttctctcgccccaccaggaaacagtgggcgaaccctgcaccccaactccttctgctcgagcaggggaaggaaacggggccccaacctcgccctgaaacgcgccgggctgaccccattatcacccgccagccagagaagggcgtggggggcccgcgtttcggacttaataaagagaagggggcgcttcctttaacgccctgccaaagcacaaggaaatctccttttctctcccggaagagacggtgccccattttaccccgacagaggggggaaccccaggagaaagcgcgggaccaacttcctctccctacaaggcagggaaaccaaaccttacccccgcaaaacaaggctgagaatcctccctcacgtcacctacctacgaaaagcgagaggacccctgccctttagcaaaaacacggggaagagtcttctctaaaaaaataggctggggttttcatcaaaagggctggagatgcatctcccccctccccaattcggccttctaggggatagctaaaaaacaccccccgccaaaaaatacaagtgctatagagcacccacccaaatgacccccaattacaaggatggagaagggacctgaatgaacccccaccttctgcctcctaagctaaagtacctatcatccaagtaggacagggtgtgcctcccccaggagaaaggatactgccgggggctgggagacccccaaccccaaacccctaagagcggggctgttgttcgagatccccccaaaaagggtccggagcccctcccccatccccttccccgaagccaggcgacgggcaagcgggcccgtagctgccagctccgggcgcaggggcagccaggacccccgtgggtctccgcagcaccccccacggcgccccctccccaggacaggcggacgggcgcggggggtccgaggggcgcctcctcaccttcccctcagcatggcgcccaaaaaagacagagcgagagcgagggagagcgggcgagcgccgcgaggggggggaaacgcatgaggccgggagagaaagcaagcgagaaagagcgagcgagcaagcgatcgagagacacccaccgaccccgcccttcctcctcctcctcctcctcctcctcctccgcggcccggcccaacatggcggccgccccccttcctcctcctcctcttcctccccccggggacgcagccccggcccaaccgggggcctgacctgtcgtcagggagcgggaggcggtggtggaggaggtgcggggtggccgggcgggcgtcgggggaacacggaggaggcgaaggcgttgatggcggcggcggcgatggcggcggcggcgactctgatggcggcggcgggggggtcccgggcgcggcctccatagttcctttgggggggaggggatgttaatgcacgaaaaaggactgcttgggcgtggcgggaggggcacacttaagctcggagggctcctgatgggaatggggtatatattttttcggtttcggaatcacctctgcgctgacctccgcgtaggccgcacggcctaggcctcggagggccgctcgccgcctgctttctccgcagcccacccttgcggtcactcgctcactggcgcggggccctcataggggcgagagccccccccccacgcacccccggggggcgggacacccgggagacacggacactggtgggtggttgggtgtaattagcgcgggccgcgcgcgatggagcaagcgaagggtaaggggagaagaggagagcgagcgaggggggtggggggttaaaaagaaaaaaaggatttgagggagagagggaacgggccgcggagacgggccgactgtctcccttctctgcccgccctgggtgccccggctgcccggcccccgccgcaatcaggaattgacacaaaatggcggctcggcccgaaccagcctagaggctgaggcgggaggaagggtgagatgggagggggaactgagaggcggaggcggaggccgtgtcacgtgcaggagaggggtagagaccgcttgcccgaaggccggcggaaagagccgaaggcaaagggcgaggccgaggggaggcggaaatagccgaaaggagctgagcaggagcgaggaggcgacgggggagagccagaaagagctgaaggtggtgatatgggtggggctagagagagcatgagaaacctaggggagccataaatagcctaagccgatcgggaccggggaaggaggagaaactgagacggtccggaaagagccgaaagcggtgtccgggtgggtggcaggaggtggaaacagccgaaagaaaagcagccagggtaatgcgattaagagaatgagctgaacgggcggggctgaaggggagaataaacgactttcaggaattcgccggagagcaagagggaaaaaccgaaaattgctagtttgaaggaaggcgggaagagccaatagttttaggtgggagaatgggagggaaggaattcaggctacggagagggaaaaaaaaaataaccgaaagctggaggccaggtgccgagagtcggaggtttccggagaagcgatgaagcccagccagcccggaggtgacgtcactcgacaacccagtcgatgatgtcatcattggatgcgagaggggcggggcttggtagtccctcaggggagtttaaggacctggggtgtaggacccatggaaggctctcaaatagcagagctagaaacactggccggtgtcgtagactgtacaaacaaaatcttttgaccctcataaccgtcctaacataagctgctgctattcccatttgcagactgaagttcggtgttttaagtaatcggttcacggtcataggattagttctaaaaagcacagcaagattttttttttaagagacagagtcttgctctgtcgcccagactgcagtgctgtgacacgatcatacctcactgtaacctcgaatccagggatcttccttaaatacttgttagctctttctacagtgccagtccctgtgatggagcatgggaacagtttctgtcttcatggaacttaaccgataatgccccaagggagagaaacagagttaaagaataaagggggtgggtggagtgttagaggagggtcttgtaattgttcttttaggctggtacatgaaaaagaagagatggttccaggcagaagaaataccttatttcaggcggggcgatgttgctcacgcctgtaatcctagcactttgggatgccggggcgggcggatcgcttgagctcgggttggagaccagcctgacgaacatggtaaaaccccttctctactaaaaatacaaaaattagcaggacatgatggctcacacctgtagtcccagctgctcgggatgttgaagagggagaatcgcccgatcccgggaggtcgcgaggctgcagtgagccgagattatgccactgcactccagcctgggcaacagagtgagactcttgtctcaaaaaaaaaagaaaagaaataccttatttcaggccctgacaaagcaaagaccacttagattccaggaagagagaaaaaccgtgtcaacagtgataaatctggagacagaggcaccatgtgacttcctggtatattgatcctacttttttttttttttttttgaggcagagtctcgctctgtcgcccaggctggagtgcagtggcgcggatctcggctcactgcaagctccgcctcccgggttcacgccattctcctgcctcagcctcccaagtagctgggactacaggcgcccgccaccacgcccagctgattttttgtatttttagtagagacggcgtttcaccgcgttagccaggatggtcttgatctcctgacctcgtgatccgcccgcctcggcctctcaaagtgctgggattacgggcgtcagccaccgcgcccagcggatcctactgttttttaaatgttccagctggcagcggggcgtggtggcacacacccataatcccaacactttgggaggccgaggctggcggatcacttgaggtcaggagtttgagatcagcctggccaacgtgacgaaaccccgtctctactaaaaagacaaaaaattagccaggcatggtgtggcgcgcctgtaatcccagctacttgggagactgaggcagaagaatcgcttgaacctagggggtggaggttgcagtgagccaagatggcaccactgcactccagcctggatgacagagcaagactccgtctcaaaaaaaaaaaaaaaaaaaaaaaaaaattagccaagcgtggtggccggcacctgtaatcaccagttactcgggaagctgaggggagaatcgcttgaatccgggaggcagaggttgcagtgagctaagatcatgcactccagcctgagtgacagaaagactttaattaaattaaatgttgcagccggcacagtggctcatgcctataattctagcacaggaggattgcttgagcccagaggttcaagaccagcctgggcaacatcgtgagaccccagtttcttcaaaaagtcaaaacatggccgggcgcagtggctcacgcctgtaatcccagcactttgggaggccgaggcgggcagatcacgaggacaggagatcgagaccatcctggctaacccagtgaaaccccgtctctactaaaaatacaaaaaatgagccgggcatagtggcgggcgcctgtagtcccagctactcgggaggctgaggcaggagaatggtttgaacccgggaggtggagcttgcagatagccccactgcactccagcctgggcaacagagcgagactccgtctcaaaaaaaaaaaaaaagaagtcataacattagcccggcttcatgctatgcacctgtggccccagctacttgggaggctgaggcaggagaatcactggagcccaggaggttgaaggaggttgaagctacagtgagctataatcatgccactgtactccagtggagactttgtctcaaaaaaaataaataaataaaaataaaaataaggccaggcacagtggctcacgcctgtgatcccagcactttgagaactctaggcaggtggatcacgaggtcaggagcagcctggccaacgtggtgaaaccctgtctctactaaaaatacaaaaaaaattagccgggtgtggtggcagttgcttgtagtctcagctactcaggaggctgaggcaggagaatcgcttgaacccaggagacagaggttgcagggagccgagctcacaccactacactagagcctgggtgacacagcgagaagaaaattcctgacaaaatgcttaaaataaatcatcagtggatgaaacttgttttaagaagctggtgctccccccaccatcccacctggtaccccagttgccagccaagaattgtgttacctttaccctgactatcgtctttctggatccaatctcagatctaatggttagataattattctcttctcctataaaatgtccctattagagtgaatcttaattggccaacaagagaccttttttccttgcatgtaagattgtaataaaatgttcactcatgctcatagctatgttgtccaaaaagttttctttaacacaccaagaactaatacttcaggtttgtaggaatggaaaggaaggacaccaaagtagctcactatgttcgattgtggatggtgccattccttcctttacaccttgatttttggacctcatgtattctgggttatggacaaaatcactgattgagaacatagaccacatctaagaggacagccattgtcttttcaaggtatggtcctgaaggggccccatctctgtagtttcaatggggccattctacaattctagatggccatctgcttttaagtaatggggaaaacaaaaatcccaccaagcaggaattccctgtacttcttcagtgtcatgatggaacattgtggaacattgtctgccaagcccttctgacacttcatctgacttttttatttttatttatttatttatttatttttatttttttgagacagagcctcgtactgtcacacgggctggagagcagtggcacaatctcggctcactgcaacctctgcctccagggttcaagtgattctcctgcctcagcctcccaagtagctgggattacaggcgcccaccaccatgcccaactaattttttgtgtttttagtagagacggggtttcaccatgttggccctgcagtctcacactcgtgaccttgtgattcgctcgcctcggcctcccaaagtgctgggattacaggtgtgagccaccgtgccctgcctgtttagttagtttttgagacagagtctcgctgtgtctcccaggctggagtgcagtgtcgtaatcttggctcactgcaacctctgcctcccagattcaagcaattttcctgcctcagccttccgagtagctgggactacacgcgcacgccaccacacctgtctaattttttgtattttagtagagatggggtttcaccgtgttgtccaggctggtcgagaactcctgacctcaggttatatccacctgcctggacctcccaaagtgctgggattacaggtgtgacccaccgtgccctgccaagttttttagtttttgagacagagtctcgctctgtctcccaggctggagtgcagtggtgcaatctcggctcactgcaacctccgcctcccaggttcaagcgattctgctgtctcagcctccggagtagctgggattacaggcatgcacaatgcctagctaatttttttttttttttttgagaccgagtttcactcttgttgcccaggctggacaatctcggctcaccacaacctccgccccccaggttcaagcgattttcctgcctcagcctcctgagtagctgggactacaggtacgtgccaccacgcccagctgatttttgtctttttggtagagacagggtttcaccatgttggccaggatggtcttcatttcttgaccttgtgatccgccagcctcggcctcccaaagtactgggattacaggcgtgagtcactgcgccccgccaatctcggctcactgcaagctccgcctcccgggttcacgccgttctcctgcttcagcctcccgagtagctcggactacaggtgcccatcaccatgcccggctaattttttgtatttttagtagaggcggggtttcactgtattagccaggacagtctcgatctcctgacctcacgatccgcccgcctctgcctcccaaagtgttgggattacaggcgtgagccactgcgcccggccaaattttttgtatttttagtagagatggggtttcaccatgttggccaggctggtcttgaattcccgacctcaagtgacccgccccgcctcggcctcccaaagtgctggaattacaggcgtgagccaccgcgcccagcctatttattttatttattttattactttttttgagacagaatctcactctatcgcccagggtcgagtgcaatggtgcaatatcggctcactgcaacctctgcatcctgggttcaagcgattctcctgcctcagctttcccagtagctagaattacaggcgcctgccaccactcccagctcatttttttttttaattttttttatttttagtagagctgaggtttcaccatgttggccaggctaatttcgaactcctgacctcaggtgatccacccgcctcagcctcccaaagtgctgggattacaggtgtgagccactgcgcccagccggcctatttatttatttattttgagacggagtcttgctttgtcgcccaggctggagtgcagtggtgcaatcttggcccactgccacctctacctccctggttccagcgattatcctgcttcagcctcccatgacttttttttgtttttttaattttatttttttctgagacagagcctcgctctgtcatccaggctggagtgcagtggtacaatcatggctcacttatagccttgacctccctggctcaagtgatcttcctacctcagccccctaagtagctgagaatgcatacgtgggcaaccagacccagctaatttgtgtgtgtatgttgtctggtttttttttgaaacagggtctcaccatgttgcccaggctagtcttgaactactcctgagctcaagtgatcctcccacttgagcctcacagagtcttaggattacaggcgtgagccactgtgcccggcccattgttttgactttagctactttctttttttttttttttcttttgacacagagtcttgctcttgtcgcccaggctagaatgcaatggcacagtcttggctcactgcaacttctgcctcccaggttcaagcgattctgctgcctcagccttcttggtagctaggattacaggcacctgccaccacgtccagctaatttttgtacttttagtagagacagggtttcaccatgttggccaggctggtctcgaactcctgacctcaggtgatcggcccgcctcagcctcccaaagtgctgggattataggcgtgagccactgcacctggcaattttcgctactttctgtcaatttcctgttcctttcccactcccctactttttggatgctcttgtaactatttattttctttttttttttttcccaagactgagtcttgctctgtcgcccaagctgaagcgcagtggcgagatctcggctcactgcaagctctgcctcctgggttcacaccattctcctgcctcagcctcccgagtagctgggactacaggtgcccgccaccacacctggctaattttttgtatttttagtagagacggggtttcaccgtgttagccaggatggtctcgatctcctgacctcgtgatccgcccgcctcagcctcccaaagtgctgggattacaggcgtgagccaccgcacccagccaactatttattttcaagcagagccttgctctgtgccccaggctatcatgcagtggcactatcatagctcactgcaaccttgacctcctgtgctcaaacagtccttctgcctcagtctcctgagtagctgggactacaggtgtgcaccaccatggtaatttttttgtgttgtcgtagggatgaggtctccctatattgcccaggttggtctcaaacacctgacctcaagcaatcctcccacttcaatctcccaaagtgttgggattacaggtgtgagccactgcacccagttaacttactatttagctgttgattagtgtctagactcagtaaagttagataataatttgtgtaagaatctcctttgtaataactggtctggcatcacagacaagcctgaaagaaatttgccagttttgtatccaatttcccaacataattgcaacatccttccagcccccccaccccccagaatatccactgctccttctttcagccatctctatttttctgctgctttcatcattaatgagttcaataacacctttgacatctgctcaccctgtttttgtatgagtcatgtttgtttgttctttgagacagggtctcattctgtcacccaggctggaggacagtggcacaatcatggctcactgcatcatggacctcctaggctcaagcagtcctcctgcctcagcctcatgagtagctgagaccacaggtcgtgccaccacacccagctgtttttgaatttttggtggagatggagtttcaccatattgcccaggcgggtcttgaactcctgaactcaagtgatctgccttcctcagactcgtaaagttctgggattactggcatgagccaccacgcccagcctggggacatttttttttttttttgagacagcgtcttgctctgtcgcccaggctggagtgcagtggtgggatctcggttcactgcaagctccgcctcccgggttcatgccgttctcctgcctcagcctcccgagtagctgggaatacaggcgcccgccaccacacccggctaattttttttttgtatttttagtggagacggggtttcaccgtgttagccaggatggtctcgatctcctctcctcgtgatctgcccgcctcggcctcccaaagtgctgggattacaggcgtgagacactgcgcctggccttttttttttttttttttttgagacagagtctcgccctgttgcccaggctggagtgcagtggtgggatctcggctcactgcaacctccacctcccgggtccaagcgattctcctgcctcagcttcctgagtagctgggattacaggtgcccaccgccacgcctggctaacttttgtaatttaagtagagacggggtttcaccatcttggccaggatggtctcaatttcctgacctcctgatctgcctgcctcggcctcccaaagtgttgggattacaggcatgagccactgtgcctgaccagggacacattttaaaagttaaaaacatgactcttagccaggtgcgatggctcatgcctgtaatcccagctacttgggaggctgaggcaccagaatcacttgaacccaggaagtggaggttgcagtgagccgaaatagtaccactgcactccagcctgagtgacagagcaagactctgtctcaaaaaaacagaaaatgtatacgtgtgtgtgtgtgtgtatatatatacacacacacacacacacacacacacatatccctgttttatttcatttttattatggggtttttgttgttttctgtttttgtttttgtttttgtttttgttttgagacagtcttgctctgtggcccaggctggatcggctcactgcaacctccacatcccacttccaagtgattctcctacctcaacctcctgagtaactgggactataggtgcccactgccacacctggctaatttttgtatttctagtagacagggtttcaacatgttggccaggctggtctggaactcctgacctcaggtaatccgcccacctcagcctcgggctattttttattgaagaataacatacgtacagaaaaagcatataatcacaggtacgcagcttgacacatttacgcaaagtgaatattctatgtaaccagcagctaaatcaagaaacagaaaattataagcagagcagagtccccgtcctgttcccatgtagtcactggtccttctaaagcaatcaccattctaacttctagctacatacataaatattctcttaatttgtcttaattttctcataaaaatggaatccataatatgtactcttttgtgtctggcttctttcattccacattatgtttgtggcatgtagttatatttcattcattctcatttctctatagtattccacagtgtgactaaactaggtattacatgattatgtggaatgattggaatgctctgacaccgctgcaactttaaataaccactttgcgctgtgtacagtggctcatgcttgtaaccccagcattttgggaggccgaggcagaaagattgcttgagcctagaggtttgagaccagtagggcaacatagtgagtccctgtctctacaaagaataaaaaaattaacaaaccatggtggctcacgtcagcagtcccagctacttgggaggttgagggaggaggatcacttgagtccaggaggtggaggttgcagtgagctggaaaacaaaacaaaacaaaacaaaacaaaaaacagaaaagaaaagaaatagcccctaagtggccagatgcggaatcccagcgctttgggaggccaaggagggcggatcatttgaggtcaggagttcgagaccagcttgacctacatgtcagaccctgtctctactaaaatacaaaaattagctggacgtggtggtgggcacctataatcccagctcctcgggaggctgaggcaggagaatcgcttgaatccaggaggcggaggttgcagtcagccaagattgtgccactgcactctagcctgggtgacacagccagattccttatcaaaaacaaacaaacaaacaaaaaatgcccctaactgggaactgcttaaatgtccataataaaagaagacaggggccaggcacggtggctggtggctcatgcctgtaatcccagtactttgggattcctaggtgggcagatcacttgaggtcaggagttcgagaccagcctgaccaacatggtgaatatccatttctactaaaaatacaaaaaatttagctgggcgtcatggggcatgcctgtaatcccagctactcgggaggctgaggcgtgagaatcgcttgaacctgggaggtggagattgcagtgagctgaaattgtgccactgcactccagcctgggagacagagtgagactctgccttaaaaaaaaaaaaaaaaaagaacagtgtattgtactgcacgcacatattttgtgcatctgctgggttataagacctaaatggtagagtcatttgcaccacatcctggacaggctagagaatctcctcttgctctgggctccaccggccttacagttcacttcgctgatgagtgagagcaggtctcccggccatgatacaagctgcccccaaaattccaaagggctttttcttaccaccttttccatcaaaggatgggggtataggggatgaaagtttcagtagcttgccctgtgtttagggaaaaaacaaaattctaacaaaactcttctcccggacctccaaaatatctctgggctggcaggtctctgtattttttttttttttattgaacttccttaaatgcacataagtcagctaatacttccatggtacctgtttctttctgctcttggtacatcgatattattattattataattatttaattattatgaaacaaggtcttgctctgtcgcccaggctggagtacagtggcacaatcacagatcactgcagcctccacctccttggctcaagtgatcctccagccttagcctcctaagtagctgagaccacaggtgcacaccaccatgcctgataattttttttttttttttttttggagacggagttgccctctgttgcccaggctggagtgcagtggtgtgatctcagctcactgcaagctccgcgttccgggttcacaccattctcctgcctcagcctcctgagtagctgggattacaggcacccgccaccactcccggccaattttctttcttttttttttttttttgtattttagtagagacggggtttcaccatgttagccaggatggtctcgatctcctgacctcatgatccacctgcctcagcctcccaaagtgctgggattacaggtgtgagccaccgcgcctggcccaatacccggctaattttgtgtgtgtgtgtgacgcagtctcgctctgtcgcccaggctggagtgcagtggcgctatctctgcttgctgcaagctctgccttctggcttcatgccattctcctgcctcagcctcccgagtagctgggactacaggcacccgccaccacgcccggctaatttttttttttgtaattttagtagagacggggtttcaccgtgttagccacgatggtctcaatctcctgaccttgtgatccgcctgcctcggcttcccaaagtgctgggattacaggcctgagccaccgcgcccggccaattttgtatttttagtagagatggggtttcaccatattgtccaggctggtctcaaactcctgacctcgtgatccgcctgcctcggactcccaaagtgctgggattacaggcatgagccaccacgcccagccagaattttttcttttttctagagaagggggtctccgtatgttgcccagtctggtcttgaccacctgaccttcattgattttcctacgtcggcctcccaaagtggtgggattacaggtgtgagccactgccaccggccagtaattatgctgatgaaagacctgttttttctccagttcctgggatggctctagggagggttatttacactgtgagtgaggaggcattcacagagaagttcctccagagtgtggaagaagcactaccatttggcaccaacgcctggagaacaaaggaggagaccattggccaaagagaggcatttccattttgttggaacctgctgaccaccaacccatagcattttttccctttcttccttgctaatccaatcgcagattcattgaggaggtgagaggtcctgagatccaggctggaagaggagtgattggtctacctggttctcaagggataatgttgccccctagaggacattttggaaattattaaggaaaattaacgactggttttttggttgtcatctggttctcaagggaacagtattgcttccttgggagaatttggaaacttaccttttttcatcgtcacaatggtgaagggtttgttactgggattagaggacaaggaccagacatgccaagatgttctacaatatagcattcctaattaataatcacctaatgaataaagctcagatagcacttaaaaagtggggaaaggactgtttatactaaattatgctaagctgtaacactgaactattccagttcttttgaaattgtttacatagcaaaatcatagttgactcctggccatttaagacttatgccaccactcttgggatagtgaaaatgttttgcaactagattgaggtggtgattgtataatatggtgaaagtactaaaagccactaaattgtgcacttcaaaatgctgcctaattttatattatgtgaatttcacctcaataaaaatgtctttttttttttttttttgagagggagtcttgacctgttgccaggctggagtgcagtggcgcaatctcagctcactgcaacctccacctctcaggttcaacccattctcctgcctcagcctcgcaagtagctgggactacaggtatgcgccaccacacccagctaatttttttgtatttttagtagagacagggtttcaccatgttgaccagcatggtctcaatctcctgaccttgtgatccacctgcctcggcctcccaaagtgctgggattataggtgtgagcccccgggcccagccaataaaaatgtttttttaaaaggatgcatatttccaaacatgagactataccatcacatttaatttttcccagaaactataaaaagtagaagtgaagagaggaaagggagacacttttagaccttcaatgagtctgcaagtacaggagaaaataatttatgcagcaattagctttattttcagggctctttttcttttcttttttttttgttgagacggagtctcgctcttttgcccaggccggagtgcagtggcgctatcttggctcagtgcaagctctgcctcctgggttcataccattttcctgcctcagcctcccgagtagctgggactacaggcacccgccaccatgcccagctaattttttgtatttttagtagacacggggtttcaccgtgttagccaggatggtctcgatctcctgacctcatgatccgcccgcctctgcctcccaaagtgctgggattacacgcgtgagccaccgcgcctggccaacaaagtgatcattttacaagagttatggcatagtcacaggtaagaacctgggtcactgggtcactccctaaccaattacgaattactatatgccatggaccttcaggattactttcttttttgttttgtttttgtttttttttttgagacagagtctcgctctgtcacccagaccggggtgcagtggcgcgatctcagctcactgcaacctctgcctcccggattcaagcaattctcctgcctcagcctcccgagtagctgggattacaggcatgtgccaccacgcctggctaatttttttgtatttttagtagagaccgggtttcaccatattggccaggctggtctcgaactcctgaccttgtgatccacccaccttgacctcccaaagtcctgggattacaggcgtgagccaccgcgcccagcccaggattactttctttctttcttttgagacagagttttgctcttgttgcccaggctggagtgcaatggcacaatctcggatcactgcaacctccacctctcaggttcaagcgattctcctgcctcagcctcccaagtagctgggattacaggcatgcggcaccatgcctaaaattttgtatttttagtagagatggggtttctccactttggtcaggatggtctcgaactcccgacctcaggtgatccgcccgcctcggcctcccaaagtgctggtattacaggcatgagccaccgtgcctggcctctatttttctttctataatccatgtacattttcctttaataatataaggcaactaaacagcactttattttcagaggcttatctaaaagatacttgacacagccctttgcagctgggtcattctctgaattctaaatgtcgtttcctgcacaaagtggttatttgatcttgtaactggcattttccccggagattaggaagtggcacaccaaagtgcaaaaaactttggaatcagaactttaatttttaatctttattttatttatttatttatttttgtgacagagtctcgctctgttgcccaggctagagtgcaatggcaagatctccactcactacaaactccacctcccgggttcaagtgattctccgccttcagcctcctgggtagctgggatcacaggcgcacaccaccacactcggctaatttttgtattttgagtagagatggggtttcaccatgttggccaggctggtctctaactcctgacctcaggtgatcctcccgtccatgcctcccaaagtgctgggattacaggtatgagtcactgtgcccggcctaatttttatatttttttgtagagacggggtctggctgtgtttgacagcctcaaactcctggcctcaagtgatcctctcaaagtgttgggattacagacatgagccacagtgcctggcctattgaaagcttttccatcataataggtccttccccccaatgcttgcagcaagtcaatagtaggagaccccaggttgcagcagagaaagaggtttaatcataggggccactgaaaaccaagagaggagatggaaggaaccacgaatccacttccccagggagttcggggctttttaagggttttggagtgggttgaagtgtggaggtcattggttggttgaagtgtgcagggtgaagtaatgaaacagggagttgaagaaactctattctcctgtcgatttggttcctctgcggggtcttcacactggttggtatcagctgttttgctggaattcaggatctgaaaaatatcttaagcttttttttttttttttttttttttgagacaaggtctgttgtccaggctggagtgcagtggtgccatcatagctcattgcagcctctaacgcctgggctcaaaggatccttccaccttagcctcccaagtagctgggattacaggcacgcaccaccacacccagctaattaaaaaatttttttttttgtagagacaggggtcttgtcatgttgcccaggctggtcatgaactcctgacttcaagtgattttcctatctcagtctcctaaagcgcatggattacaggcatgagccaccatgccgggcgctaagcaattcttattatttatttatttatttatttatttatttttttctgagacggagtcttgctctgttgcccaggctggagtgcagtggcgcgaactcggctcactgcaagctccatctcccaggttcatgctattctcttgcctcagcctcctcagtagctgggactacatgcgcctgccaccacgcccggctaattttttgtagttttagtagagacaaggtttcaccatgttagccaggctgatctcgaactcctgacctcgtgatccgcccacctctgcctcccaaaatgctgggattacaggcgtgagccaccacctccggcctaagcaattcttaaataaaaatctatgattccgccaggcatggtggctcacacctgtaatccgtgcactttgggaggccgaggcgggtggatcacaagttcaggagttcgagaccagcctggccaacatggtgcaatccctgtctctactaaaaatacaaaagttaggtgggcatggtggcttttttttttttttttttagacgggagtctctgtcatccatgctggagtgcagtggcaggatcttggctcactgcaacctctgcctcccaggttcaagcgattctccggcctcagcctcccaattggctgagactacaggcgtgtgccaccacgcccggctaattttttagtattagtagagatgggggtttcaccatcttggccgggctggtctcgaactcctgacttcgtgatctgccctccctggcgtcccaaagtgctgggattacaggcatgagccactgtgccctgccaaaaagcctatgattctaacatcagaaatccttccacctcagcctcccacgtagctgggactatagactcagtaccaccacaccaagctaatttttgtatttttaatagagatagcgtttccctatattgaccacctggggccatccctggttttttttttttttcccttccttccttcctttccctctctctttccctccctccttccttcctttctttctttctttcttttttttttttttttacagagtcttgctctgttacccaggttggagtgcagaggcatgatcttggcttactacaacctccgcctcccggattcaagcaattatcctacctcagccttccaagtagctgggactacaagtgtgagccaccatgccctgctaatttttttatttttactaaagacgggatttcaccacattagccaggctggtctccaactcctgatttaaagtaatctgcctgccttggccttccgaagtgctgagattacaggtgcgagtcaccgtgcctggcctattcctgttttcttaacgctcctctctcccactgggccgtgactgcctctaaggcagagatgtgttcatttttattattattgtatgtccagggctgggcacaaagtgcaacacatagtagggacatgaaaggctgggcacagtggctcatggttgtaatcccagcactttgggaggcagaggcgggaggatggcttgaggccaggagttggagaccagcctaggcaacagagggaccccatctctatgaaaaaaaaaaaaaaaaattgacagttcaatgtcacctctgataagccttccctgaccacccctgttactctgtagccccatgtcctgctttatttttctccaaagcatttatcatcgctgggtttatatttatttctcttcgggcttttctcactggatcgtaaactccatgaggacagggctttgtcgatttcactcaataccgttattttacaacatccctattgctgggatctcagtatgcactccttaaatatttgcagaatttaagtgccacataagtgaccacgtgggcaacgccctcggggccttaagccgcgccatttttggggctaggattggttggaccctccgtcacgtgacatgcagtcgccggatcgcctttgagtctcgtgaggtacttttggtcccaggctccgcggacgaggtactgcgcaggcgtgggagggtctgcgcatgcgcagaagcactccgggcgtgctgccggcggcggtaggtggcgcgcgggtccggcgggcggttggcttgagcgggaccggagctgaggcaggaagagccggcgccatggtggagaaggaggaggctggcggcggcattagcgaggaggaggcggcacagtatgaccggcagatccgcctgtggggactggaggcccagaaacggtcagggccggcgcggcttgaggccgctagggtctggagggggcgtctattctgaggcgtttgcggcccggaaggagcgggaaggtgtgatttgaagggaggaggcgggaattctgtgctctgggatcgtctctctcttggggggactggaggagttgattggggatgtttctggaaggtctgggaagtggttgggagggccgttccgaaggatgggagctctgaagggggcgttggggagtcctgagagagcgggagaattcaaactcaggaaatccgaggcccgaaagcggtgattgtggggtttgatcgcggttaggggataagaggggctggggatacgtggaaagggtgaggtgagggacgcagttcattcattcgagggtatgggacctggttccgtgctgcacacaggggagactggactggccaaccggacagacgggagcttacactcttgtgggagctcacgggcgggccagtctgagagaatgcgggttttgaggagttttggagcaagttatctcaaatgggaatcttgagaggctcggagaggctggagggggacggccgtaggctcccgaaaaggttgcttgtgtttggtatggggctgtgtcttgataggacaggagacgtagtttgggcattgtggagtagcttagggaattctttttttttttttttttttttttgagatagtctctctctgtcgcccaggctggagggcagtggcgcgatctcggctcactgcaacctctgcctcccggattcaagcgattctcctaactcagcctcccgagtagctgggattataggggcccgccagcacgcccggctaatttttgtatttttagtagacacggggtttcgccatattgacgagactggtctcgatctccttacctcaagtgatccacccgcctcggcctcctgaagtgctgggattacaggagtgagccaccgcgccaggacgtcttttgttttgtgcagttgggtgacctcggttcactgcagcctctggcctcccgggttcaagacttcctctcacctcagtcttctgagtagctgggattacaggctcgcgccaccatgcctggctaatttttgtatttttagtagacatgggttttcaccatgttggccaggctggtctcaaactccggacctcaagtgatctgcccgccacagcctcccaaagtggttggattacagacgtgagccactgtgcccagcttgttttttttttttttctttctctgtggcccagtggagtgcagtggtgggatcacagctcactgtagcctcaacctccaaggctcaagggatattccctcttcagcctcccaagtagctgggactacaggcgtgccccaccacatcatccgactaatttttgtttttttttttttttgtaggatggggttttgccatgttgcccagactggtcttgaactcccaagctcaagcgatcctcggcctcaagagatctccccccatctcagactcctaaaatgctgggattacaggcatgagctaccatgcctggcctcattgatcaatatttttacttagcctggacgcagtgactcacacctgtaatcccagcactttgggaagctgagttggggggaggggacctcttgagcccaggagtttgagactagcctgggtaatgttgccaaacccagtctctacaaaaaaatacaaaaattagccaggcatggtgacataagtttatagtcccagcttgtcaggagactgaggtgggagcatcacctgagcccctgggaggtggaggttgcagtgagccatgatcacaccactacaccccagcctgggtgacagagtgaggccccgtctcaaaaaaaaaaaaaaaatccacaagcgtgtgtatatgtgtcagttattaaaggatggtgaagtgagagggttgttttgataggttggccagggaagggctctgaagaggtaacattgagcctcagacttatatgggaaagagccctgtggtcatctgggagaactttcctagctaagagaacagcaagtgcaaattcccagaggcccaggcatgattgtcaaattagagaaataaggtggcaggaaccaaatgatttgaggagtagcttttattctaagtgtgtgggaaaacctgttggagtgttttgagtgtgggagtaacatgatctgttttttgtttgttttttgagacggagtcttgctctgtggcccaggctggagtgcaatggcacgatctcggctcactgccattgcagtgaatccgcctcccaggttcaagcgattctcctgcctcaccttcctgagtagctgggactatcggcatgtgccacaacacccggctaatcttgagtatttttagtagagacggggtttcaccatgttagacaggatagtctcgatctcctgacctcgtgatccgcctgccttgggctcccaaagtgctgtgattacaggcgtgagccactgcggcctggcctggtttgtgttttaaaatgatcgctccagaataggttaaagtggtcagaaatggaagtaaagattctggctggactgttgcagtaatccagttgagataaaaatattggtggcttgaaactcaagagaaggggtcaaataaatatattctggatatattttgaaggtagaagagggaacagaatttggggcagaagtccaggatgacaccactgtttttggcttgagcacctacctggaacgatggaattgccattttgaaagatatggagagctgtaggtttggtggggtcggggaagagtcagttctcttttaggtttcagatttgttttttttgtttgttttttttttttttgagacggagtctcactctgtcgcccaggctggagtgcagtggcatggtctcggctcactgcaacctctgcctcccaggttcaagcaattctcctgcctcagcctcccgagtagctgggattacaggcgcccgccaccatgcccagctaatttttgtatttttagtagagacggagtttcaccgtgttggtcaggctggtgttgaacccctgacctcgtgatccacctgcctcggcctcccaaagtgctgggattacaggtgtgagccaccatgcccggcctcagatttgtttttttatacaactaagtagaaatatgtgaggggttgagttcagaggtaaaatttgggtgatggtgggtattgtgtgagtacagagtatagaattaatggaggggttggggaggcagacacgtcaggagaatttagtttgagggggtgggagctttcagaaggttttagagggtgcagtggtgggatgggaattacctcaggctcatttcagatctgtggggtcttctttgatggggtggggggatgtcatcatgaggcattaacattggtgggagggttgaaggcacctggaatagattgggaattaagtgatgagaatgtgcctctggacataggtggactgcattgattttagggactgctattttctggatggagtggaaagaggatttatgtgagttggaggaaactttgaggaagcttggtgtgttctgagatcctaaagggttggggaggggattctaaggtactggaagggttaatcgaaggggtttgcggcagcagatagctttgtttgaagtggggcaaagttggtgaggtttaaactggaatgtagttagggaactttcagagggatggggatgatttttctgagaagcagtgaagaatggatgggggcctctgagtgggagatgacctaagggacaagtcagggtcagggcatggaatttgtgggaggtaggaattattctgagggagtggagctgtaccaaatttggtggagaacatgaaaaggattggctgggggttgcaggagggagggaagaggttgtttgtaatttgtactctatttttagacagtcttagagagtttattaaagtgttttttgtccattttcagccgaggtttttagaaattaaaaatttttttgtgtgagtacatagtaggtgtatacattttgggggtatgtgagatactttgatacaggcatacaatgggtaataatcacatcagggtaaatggggtatccaccaccttaagcacttatcctttgtgttacaaacaatccaattatattcttttagttgctttgaaatgtacaacaaattattgttgactgtagtcaccctgttatgctatcaaatactgtatcttattcattgtatttaattatatttttgtatccattagtcatccctccttcccctccaccccccactacccttcctagcctctggtaaccctcagtctactatctgcatgagttcaattgttttaatttttttagttcccacaaataagtgacagcgtgcaaagttttctttctgtgcctgatttatttcacttaacataataacatccagtgccctccctgttgttgtaaatgacaggatctcattcccttttttttgtagacagggtctctctgtcgcgcagactagagtgcagtggtgtgatcacaactcacttcagccttgacttcttgggctcaggtgatcctcccacctcagcctcccggtagttgtgactatagcacgtgtcacaagcccagctaatattttagtacaggtggggtttcaccaggctagtctccaactcctgggctcaaataatcctcctgcctccctgcaaagtgctgggattagaggcgtgaacagcaatgcccagcctttgtaccacaatttctatttttttttttgaaacggagtctcgccgtgtcgcctaggctggagtaggctggagtgcagtggcgcagtcttggttcactgcaagctccgcctcccaggttcacgccattctcctgcctcagcctccctagtagctgggactacaggtgcccgccaccacgcccggctaatttctgtatttttagtagagacggggtttcaccttgttggccaggatggtctcaatctcctgacctcgtgtaccacaatttctttatccatttgtctgttgatagacatatgggttgctttcaaatcttggctattgtgaagagtgctgcaataaacatgggatttattgcagttttttttcttttgagaccgagcctcgctctgttgcccaggctagaggacagtggcacgatctcagcccagtacaatctccacctcccaggttcaagcgattctcctgcctaagcctcccaagtagctgagattacaggcacctgccaccacgcccggctaatctttgtattttttagtagagatggggttgctgtgttggccaggctggtctcaaactcctggcttcaggtgattggccctccttggccccccaaagtgttgcaattacaggcgtgagccaccacacccagcctgatttattttcatttgggtatatacctagcagtgggattgcatttttacccgagtcttttttttttttttttttgagacggagtttcgctcttgttacccagactggagtatggtggcgtgatctcagctcaccgcaacccttgcctcccaggttcaagcaattcttctggttcagcctcccaagtagctgggattacaggcgtgtgccaccatgcccggctaattttgtattttagtagagacgggattcctccatgttggtcaggctgtgaactcctgacctcaggtgatccgcccgccttggcctcccaaagtgctgggattacaggcatgagccacagcccccggccttcacctgagtcttatagcagctctctggagtcggaagggcagtgatttccttctctgttcagatgaggaaggaggctccacagagcaaattgacttgcctctaagagggctctaggtgggataggagggttctaggtgggataggagaactctggagactggagttcctttatgaaacagaagccctggaaatgggcaggctgataaaatgtacaaattgtggggcattttataagacagttatcctacttctcttccaaaagtcagtttcatgggaaaaataagtgaagggactgttgtggattaaaagagagtaaaggccgtcacagtgactcagcctgtaatcccaggactttgagaggccgaggtgggtggatcacctgaggtcaggagttcgagactagcctggccaacatggtgaccgtctctactaaaaatacaaaaaaaattagccaggtgtggtggtgggtgcttgtaatcccaactacttgggaggctgaggcaggagaattgtttgaatccaggaggcagaggttttagtgagccaaggtcacactatcgcactccagcctgggtgacaagagcgaaactctgtctcaaaaataaataaataaaataaaataaagtaaagaagcagcttcctagagcagatttggttgcttaaattgaggccaagtttctggagtttttattgatagttgacaattacaactaaaatttttttttctcgctctgttacccaggctggagtgcagtgacgcagtgacgtgatcttcagctcactgcaacctccacctcccgggttcaagggattctcccgcctcagcccccaagtagctgggaccacaggcgtatgccatatcactcagctaattttgtgtgtgcatggcgtatgccgtaacactcagctgattgtgtgtgtgtgtgtgtgtgtgtgttgttttttttttttttttgtgatggactctcactctgtcgcccaggctggagtgcagtggcacaatcttggctcactgcaacctccgcctcctgagttcaagcgattctcctgccttagcctctggagtagctcggattacaggcgcgtgccaccacacctggctgatttttatatttttagtagagacggggttttaccatgttggccaggctggtctcaaactcctcacttcaagtgatctgcccacctcggcctcccaaagtgctgggattacaggcgtgagccactacacccggcctatgtgtgtgtattttatttttttatttttttgagacggaatttctctcttgttgcccaggctggagtgcaatggcgtgatctagactcactgcaacctctgcctcccgggttcaggcaattctcctgcctcagcctcctaagtagctgggattacaggcgcctgctaccgcgcccagctaatgtttgtatttttagtagagaccaggtttcgccatgttggccagggtggtcttgaactcctgacctcaggtgatctacccgcctcagcctccttaagtgctgggattacaggcatgagccactgcgcctggccagaagttaccttctttgtgcctgttttctcagctgcaaaagaggggtaacaaagtgccagcccattagattgtcatgggaattaaatgacataatacatacaaagagcttagtagaacagtgcttggcacatagtaagtgttagataaatgttggccattattattttattatgtaccagatttctataattctgctgatggacacaggtttgttttggtgtgtctattaattcacagccatttgagtaacagtatgtcctaaatgccaaggaagttactggttctagtgatacagtggtttctggagtttacattctaatggaggagggggcagtaaacatataaacaagtagtgtagcttagcacagtggtgtgtggctgtgatcccagctactggggaggctgaggttggaggatcacttgagccaggcaattgagactagcttgggcaacttagtgaggccccatttcaatcaaaacagtgggcaacacagaccccatcttaatcaaaacaaaaacaagtagcataattcgagatagaagaggatgtggacctattttaaattaggtggccagtatggacttctctaaggaggtgacaattgagctgagacctaaagaatgtgtcccttaagaagttgagggaagaagcaatgggaagcactaatgccaaggtcctaaggtgggagcaaggatgggagcaaggatgatgttctctaggatcagcctcccgagtagctgggactacaggcacgtgccaccacgcctggctaatttttgtattttgagtagagatggagtttcaccatattggccaggctggtctcgaactcctgacctcaagtgatccgaccgcctcggctaattttgtgtatttttagtagagacggggtttcaccgtgttagccacgatggtctccatctcctgaactcatggtcctcccaccttggcctcccaaagtgctgggattacaggcgtgagtcgccgcgcctggcacacccagctaatttttttttgttttgtacagatggagtcttactttgttgcccaggctggtttcgaactcatgggctcaagtgatcctcatgccttgccctcctaaagtgctgggattacaggtgtgacccactgcgtccagcctgctgtagttttgtcggagagaaacgatggtggctcagactagagtggtgtttgtggaacttgagggaagtagatggacaatgctgctgtgaatgtgtatctttttttttttttttttttgagacagagtctcactcttgtcacccaggctggagtgcagtggcgcgatctcggctcactgcaagctacaccttccgggttcacaccattctcctgtctcagcctcccgagtagctgggactacaggcacccgccaccactcccggccaatttttttttttttttttttgtatttttagtagaaacggggttttaccatgttagccaggatgatctcaatctcctgacctcgtgatctgcccgccttggcctcccaaagtgttgggattataggcgtgaggcaccgtgccctgctgaatgtgtatcatttttgtgcccacttgggtatttctttttttttttttttttttgagacggagtctcgctctttcgtccaggctgaagtgcaatggtgcggtctcggctcactgcaacctccgcctcccgggttcaagcgattctcctgcctcagcttcccgagtagctgagattacaggcgcctgccaccactcccggctaattttttttttttttctttttgaaacagacccttgttctgttgcccaggatggaatgcagtggcgccatctcggctcactgcaaactccacctcccgggttcacgccattctcttgccttagcctcccgagtagctgggactacaggcgcccgccaccatgcccagctaattttttatatttttagtagagatagggtttcaccttgttagccaggatggtctcggtcttctgacctcgtgatctgcctgtctcggcctcccaaagtgctgggattacaggtgtgagccaccgtgcccagcccacgcccggctaatttttgtaattttagtagagatggggtttcaccatgttggccaggctggtctcgaactcctgacttcaggtgatctacccaccttggcctcccaaagtgatgggatttgtaaacccagcactttgagggaggcagaggcaggaagattgcttgagcccaggagctggagatgagcctgggcaacatagtgagaccctgtgtctacaaaaaaaaaaaaaaacccataaatcagccaggtgcagtggtgtgcacctatagtcccaggactcaataggccgaggtggcgggatcacttgaacctgggaggttgaggctgcagcgagccctgatcttgccactgcccttcaatctgggttcacagaatgagaccctgtttcaataaaacaaaacgtaaacatggtatttggtgttgatggcagttgagtatttaatttaatttaatttaattttttttgagacggagtctgtcacctgggatggagtgcagcggcacagtcttggctcattgaaacctctgcctctcaggttcaagcgattctcctgcctcagcctcccaaatagctaggattacaggtgcccgccaccaacatgcccagctaattttttttttttaaacagagtctcgctgtgtcacccagactggcatgatctccgcttactgcaacctccgcctcccaggtttgagtgattctcctgcctcactgtcccgagtaactgggactacaggcgcctgccaccacgcctggctaatttttgtattttctgtagagacacggttttgccatgttagccaggctggtctcgaacccctggactcaagtgatctgcccgccttggcctcccaaagtgctgggattacaggcgtgagcccccacgcctggccataattttttttgtatttttagtagagagggtgtttcaccatgttggacaggctggtctcgaactcctgacctcaggtgatccacccatctcagcctcccaaagtgctgggattacaggcatgagtcaccgggcccggctgaataatgaattttaaacaactgcagagcagtctgtagagctatgtaggaatgtaggtcgtggagagcagatttattgtcagggactttttatatgtagctgttgctggaagagttcggggagggggagtgcttgctggtattgactcagccatgataaaaaagcctttttttgaggaaatggcattggagttgggttttgaaggggaaaggcgtaggtaggcattgagaggaagaaatggtgcattttgcgagggtggaatgttgtgattaaattttatttaatttttaattaaattaatagcaaactcttaccagcagaacttaaattgtgtgaaaattattcttagttattactaaatccttttcagtatgaataatacatttgctgcagaattattaatgagtttggttacatgatgcagcccaagatcttgatgagttgtttcataatacatgatgtaaagtctgtatttcctttttgaaatctgaaaaaattgtgactctgaaatacttctggttcaagagatttcagataagatatagttgacctattctgcttcctactgacctcagagaagtcttgggatggcctgacctctgattgccttttttcagcctcatcttctgtcactttacagatttaaaaagctaaaaacaaggctgggcacggtggctcatgcctgtaatcccagcactttgggaggctgaggcaggtggatcacttgaggtcaggggttcgagaccagcctgaacaacatggtgaaactccgtctgtaccaaaaatacaaaaactagccaggcgtgacagtaggcgcctgtaatcccagctactcgggaggctgaggcaggagaattgcttggacctgggaggcggaggttgtagtgagctgagatcacgccactgcactccagcctgggcaacagagcgagactctgtctttaaaaaaaaaaaaaaaaaggtaaaagcaattcctgtgtacatgctcttttcatgccaccatgtgttttgcttgtgtgttatacttaactagtgcctcttctcagcacctcttctgctgtcatgctagtttgagccaccatcatcctccctcaccttaactgtgacatcttcctacccccatggctttccatcatgcctcgaagaaaatccagaatccttccattgcatgtaagagccttcatgatgtggccccttgttccaacttttcagcctctctgtcattcctgtccctagaacatgccaagcactcctgcttcagggcttttgcatttgctgttttctctatctggaatgttctgctgccaaatatctgtgtgtttgtcctttatttcattttgatttttgctcatatggcatctcctcagaaaggcttgtatgatttctgtctcaaatagcgttctccatcattcttgattcttgtcacacttgattttcatcactttttcacatattatgtatctatttgtttatctgtctcctactttttcatgagggcagggactatgtctgattcaccgccttatttccacaccatagaaggatgcctggcatagttggtactcaataaatatttgttgaatgaattgttttgtgcagtatggattagagcctgtctctttcctagattcgaggtgtgatgcctcaatgcagttagaaccaaaatgatttttttttttttgagacggagtctcactcttgttgcccaagttgaagtgcagtggcatgatctcggctcactgcaacctccgcctcatggtttcaagtgattctcctgcctcagcctcccaagtagctgagattacaggcgcctgccactacgcccagctagtttttgtattttagtagagacggggtttcaccgtgttggtcaggctggtctcgaactcctgacctcaagtgatccgcctatctcagcctcctaaagtgctgggattacaggcatgagccaccgtgcctggcaaaccaaaatgatttgtgtattttttgttcttctgtgattctgcaagctcactgttctgtatcatcaggttaacaatgtttgtcttacaggctgcgggcctctcgggtgcttcttgtcggcttgaaaggacttggggctgaaattgccaagaatctcatcttggcaggagtgaaaggactgaccatgctggatcacgaacaggtgcgctgttgtgagctcattcctcccctgctctggctcccctttccagcatgaagatctgcagattttgtgagttcctccttgtgccttaagggctgtgaaaggagggctaacattaataaaccattgcctctggagactgaaggtgctattgttgggtttgaattctagctccaccacatctagctggatgagcagtagagactcacaccccctcattgagcttgcctgcctgtaaaatggggttagtaatatctcccttggtggttgcttgtgaggaggtgtagagaagtgtttttccaatttgtgcctaaaaatgacctgagtgactaactgaaaatgcagagtggcctggaggcttcgtggtgccctagctttcacccctagtgattctcatttaggtctgaggcgagctcaggagtatgtgcatttaaaaggtgttttagggctggacgcagtggctcatgcctgtaatcccaacactttggaaggctgaggcaggcggatcatctgaggtcaggagtttgagactagcctggccaacatggcaaaactctgtctgtactcagtatacaaaaattagccaggcatgttggtgtgcacctgtaatcccagctactcgggaggctgaggcacaagaatcgcttgaatctgggaggtggagtttgcagtgagctgagatggcaccactgcactccagcctgggcaacagagtgagactttgccttaaaaagaaataaattaatgaaaggtgtttcaggagattatgatttagatggtccacagacatcactttaaaaaacactggatcaggccaggcacagtggctcatgcctgtaatcccagcactttgggaggctgaggcgggcagatcatgaggtcaggagatcgagaccatcctggctagcacggtgaaaccccatcactactaaagacacaaaaaattagcagggcttggtggcgggcgcctgtggtcccagctactcgggaggctgaggcaagagaatggcgtgaacctgggaggcggagcttgcaacgagccgagatcatgccactgcactccagccttggcaacagagtgagactccgtttcaacaacaacaacaacaaaaacaaacaaaaacaaacaacactggatcagagagaatgtgggcagactgctttgtatagtgcttgaacctaacaagtatccagtaattaggaataatgatctgacatgctgtttgtttgtttgtgtgtttttgcgagacgagtcttgctgtgatgcccagactggagtgcaatggcgcaatctccgcacactgcaacctccgcttcccgggctcaagtgattctcctgcctcagcctctgaagtagctgggattacaggcacgcaccaccacgcctggctaagttttgttttgttttttttttgagacggagtttagctcttgttgcccaggctggagtgcaatggcgtgatcttggctcactgcaacctctgcctcccaggttcaagcaattctcctgcctcaatctcccgagtagctgggattacaggcatgcaacaccatgcctggctaatttaacgtttttagtagagaccgggtttctccatgttggtcaagctggtcttgaactccgacctcaggtgatcctcccacctcggcctcccaaagtgctgggattgcaggcgtgagccaccgcacccggccatgcctggctaagttttgttatttttagtagagatggggtttcaccatattggccaggttggtctcgaactcctgacctcaggtgatccgctggcctcggcctcccaaagtgcggtgattacaggtgtgagctaccatcccctgctgacataatgctgtttgattaatattataatggtagagcccaactccaatgtagctttctctgaccaggctcatcttcaaggtgaaaataagtgctgctctctctacattcccatgcctcagtgacattttatttattttatttatttattttgagacaaagacttactctgtcgcccaggctggagtacagtgacacaacctcagctcactgcaacctctgcctcccgggttcaagcacttctcctgcctcagcttccctagtagctgggattacataattacttcatctggttgtaagaatccaacattggaggccaatcacagaacagtgcgattctgacaccacaggtgtgaggccactgcacccatcttagagcgtattatgtagtttacattcaacaagcatctgagagcacctactgggtgccctgaagtctgctaggtgctggtgatagaaagatgctcacggtttggttcccattctcaaggtttttttttttttttttttccggaaaccatagcaggctccctgactgaggttgtggtacatgaaagatttcctggagtcctgatctgagctaagtcttaaagaacaaggagggttgtcaagataagagcctgtgttttaggcaggggacatagcagtgtcacaaaggcaccctacagtgtggtagaaatggaagctaaaagtagtttggtgtttttagagtgtgagacccaaagtggtgggtagggacaggttgctggtgaagtccaagtcaggaggggctcctaggaagccccactgtaagcttttacttaatcctctgggtggtgcagactcactgaagagtttcaaatgacaggaagggtgacatggttagctttgggctttatgtgtagatcagtaattactgtataaactatggttggcacaaaatacagggcagaagaccacttagaaggcagtttttagtagtttaggtgagaggtgaaagtggccttgctgatagggatggcaggaagcacacagatgtgagaaatagatttaggtggtagaattgggaggtctgtgtatgggagcttaaggaaagccaggaataaccagagcagctgacactgaaggggctaggcactgttctcagagctgcagttgtattatctcattgagtcctcacaacacatctgagatcaaggacccattaccatccctgttttacagatgggaaaactgagtaaaaggaagaaaagtactggcccatccaaggccccagtagttagtggtacggccgggacccaggcatctgactccagagcccatgttctcagccacctcactatggaccactctcatggaaatagcaaggatatgaagatgaggcttctggcttgagtgactgggtgggtggctggtggactccggagacagcacacagaagcaggcagacatgtagggtttatggatatctgagagaaaacggctggtgggcagtacagtagagaagactcaggtggatcaggaagaaatctgcaccagaaagagtgatttgaaaaataacagcagattttggtagaaactgaaagaggcattgagttggtttatggagctatacagagtggaaagataagtaattctgagatggaagcttggggacagccacacctaagagggcccaaattgagactagaatgtgtagcacgagaggagagcaaagcaaggaaggtgtgatctgtggactgatagtgatgaaatgataattgtatgtgtatgggttttttttttttttttttttttttttttgaggcagtctcactgttacccttgccggaatgcagtgggcatgatcatggctcactgtagccttaacttcctgggctcagggtattctcccacttaagcctcccagtagttgggactacaggtgcacgccaccacacctggctaattttttgtattttttgtagagactgggtttcatgattgttgctcaggctggtcttgaactttctgggctcaattatatgttttttttgtttgtttttttgagatggagtctcacttgtcgcccaggccggagtgcagtggtgagatcttggctcactgcaacctccgcctcctgggttcaagtgattctcctgtctcagcctcccaagtagctaggattacaggcgtgtgccaccacacccggctaatttttgtatttttagtagagatggggtttcaccatgttggctaggctggtctcgaacttctgacctcaagtgatccacccacctcagcctcccaagctgctgggtttacaggtgtgagccaccgtgcccagcctcaactgtatttttttttttttttgagacagagtctcgctctgttgcccaggctggagtgcagtggcgcgatcttggctcactgcaagctctgcctcccgggttcacaccattctcctgcctcagcctccctagtagctgggactacaggcgcccaccaccacgcctggctaatttttttgtattttttagtagagatggggtttcaccgtattagccaggatggtctcgatctcctgacctcgtgatctgcctgccttggcctcccaaagtgctgggattacaggcgtgagccaccacgcgtggccctcaactgtacgtttttatccatgtcctcgttttatatgggattcccacattcttgctgaggttcacacagttgttgagccaggatttgaatcaaagattgaatccagcctgaattatttcagagccttactgttaaccattgtgtggtacagcttctcagcacataatgagatccctgaagaagcaggatggaatgggtcaaggatacagggttagcctagaatgggaagtgggccagctcattttcttggaggagaaggtagtaagatagagagtgtgctgtggatggttggtaggaggtgttgaggggagattacttctgttgtacctagtcttggtgaaggtggcaaggttatttgcagagattaatggttaaattagatgtttgatgtgtgaagaaatactttgagagcagtatggaatctgtaatcttactggtggctattaggggattatattatcctgtctttgaggctctgctctgctgatgttcagccttaggggtgaaataattcctctgttccagtccccactcatctctccacctctctgagttctttttttttttttttgagacagagtctcactctgttgcccaggctggagtgcagtggcacgacctgggctcaatgcagcgtctgcctcccaggttcaagcgattctcctgcctcagcctcccgagtagctggaattacaggcgtgtgccaccacgtccggctaattttgtatttttagtagagatggggtttcaccatgttggtcaggctggttttgaactctggacctcaggtgatctgcctgcctcggcctcccaaagtgctgggattacaagcgtgagccaccgcacctggccatagtctatctatgttttttaaaagttcatttcaagcattcttaattgtgtctgatttttgcacaagtttgattttttttttaagttttctcatgaggttgcaatttttgttgttttttgagagagggcctctctgtgttgtccaggctagtcttgagctcctggcctcaagcagtgatcctcctgctttggcgtcccaaattgctgggattacagatgtgagctactgtgccaggctgcactggtctactttttttttttttttttttttttttgagacggagtcttgctctgttgcccaggctggagtacagtggtgcaatcgcagctcactgcaacctccgcctcccctgttgaagtgattctcctgcctcagcctcctgggtagctgggattacaggcacacaccaccacacctggcttatttttgtatttttagtagagatggcatttcaccatgttggccaggttggtctcaaactcctgacctcaggtgatcctcctgcctcggcctcccaaagtgctgggattacaggtgtgagccaccgtgccctgcccacactggtctagttttaaaccactggaagacagagatttaatcctttaaactacttgtgtatttccccaaatgcttatagttgggcacatgctaagtatttagtcaattcttgccactgttaatcagtcatttgttagcagttacaaatttgcatagaagaagaaagcatggatttttttgttgacagtgaattttctttataaacacaagggggtgctctttaaccatcaatgaccagtttaaaaaaagtttaaagtcattttaaagccttagaaggaagcctgcataaggcaaattgctacaggaacagtaatacattttagggctgtgcacagtgtttcatgcctgtaatctcagcactttgggaggctgaggcaggcggatcacgaggtcaagagattgagaccatcctggcaaacgtggtgaaaccctgtctctactaaaaatacaaaaattagctgttgtggtggtgcgtgcttgtagtcccagctacttgggaggctgaggcaggaggagaatcatttgaacccaggaggcggaggttgcaatgagccgagatcatgccactgcactccagcctggtgacagagcaagactgtctcaaaaaaaaaaaaaaaaaaaaatttaggtggtaggtattttagctatcctttaaaatttaaagattctttttaagatttattttccctaaaaatacaagacttaaaaaaatatgtgtattattcctaggtaactccagaagatcccggagctcagttcttgattcgtactgggtctgttggccgaaatagggctgaagcctctttggagcgagctcagaatctcaaccccatggtggatgtgaaggtggacactgaggatatagagaagaaaccagagtcatttttcactcaattcgatgctgtaagtttcttattataaaatctgctgtgggaattaaacaaattaaggtgctagttgtatatactttcaaatcccaaagcaatctgagagcattcaaatatcaaattctgagctttttcccaagaaaatgtataagctgttctattgtttaggcttagtatattgtgtgaatgtgttgctagagaggtccagtctgttgcatctgctgtagttgttggtgacttgctgtctgctggcttcttctctgggcatatgttccctcagccaggtttcgtctttggtgttttgtcttccttccagaatctttgcacataactttaatccatgttattgcaaatgttttcttccgaaaacttaacaagttggtgattaatttctgtggcagcggcatttttttgttagaaatatcaaactacagcttgtgttttgtcttaagaaaagcacacctgatcttgatctatgtctgtctgtctgtttctcacagtcacattgaccatgttgccatggataactagagaaaaatcactgtagtcgtaagtcaaatgaggcatatccagcctcatttagtttcactgccaaatctatgcggaggtgaaaggataaattctttgtcaatatctgcaacctttcagacatagttccctgcattctggaaaagcttaacaaatcttgataaatgtgaaatagtcatagatgagctactagttttttaaatgaaaggccccagtatgttacatgagaggttagaatttgggttgggtagttttttttttttgcacctttttttatttgagatggagttttgctcttgtcgcccaggctggagtgcaattgtgcgatcttggctcatggcaacctctgcctcctgggttcaagtgattctcctgcctcagcctcccaagtagctaggattacaggcactcaccaccatgctgggctaattttttgtatttttagtagagatggggtttcaccatgttggtcaggctggtcttgaacccctgacctcaggtaatccacctgcctcggcctcccaaagtggtgggattacaggtgtgagccactgcacctggcctgttttttacacttttctttctttctttctttcttttttgagatggagtctcactctgtcgcccaggctggagtgcagtggcatgatcttggctcactgcaacctccgcctccctggtttaagcagttttctgcctcagcctcccgtttttacacttttctatttcatatgtgcatctgttcaaatatgggcttggaaggatggatcatctgtgcatttgtcctgttttctttttcctagtcccttctattttttaacttgaggtattgggacactttccatttggacataagtcttcattttcttatctgtagtaaccacatttattttatgccaggtgtcccttgaacttgtagagttagagggtttgttaaaactgaagtgtgaggccagttgattgtgtaatgcgtgtgcatggggccatgttgaccgccttgcaggccgtgtttggctggtccttgcaggttttatagttactttagactctgcagggttccatttgatcaattggttgcatgttcacctgtggatttcttactttttagatgggatttttccttgggtggctgcattctttgaaacaccaaaggaacacatttctctgtgagtgttatttcggtattcaggctgctagacaacagcaaagagggtctatcaagtgaaaatgtccttttgttcaggagaaagcatgtgcaatttggaagttgtcttttgaccatgatcacaaagcttctcccgaaaagatggtattttgtgcagtagaacttagccatttccaatacctcaacttactggaatacaacctggaggccccagagcaacactgataattccactgagtggatcaccagttcattgtctaagcctgaatggaaggtcacttggtctgtaaccttttcttttgtccttaaattcagataaagtttcacaccgcaatctgtggaaaaatgatctcaacaggacttgtttatcttctttatcttaacatatcaatcaaaaggaggggggtaaaaagcccttgtatttaaacatgacctttgggtcaatttaaaaaactggttttgcttgtccctgtagcttatttggattttaatagatttagcagtatagaaacaacttgctaagttattttttttatgagaactatgaaatgtgtatatgttcgtggattacagaaaacatttgttgaatggcttttactttttagctaaacacattttattttggctgcagaacgtgacggtctcataacttatattttctacacattgaaacctgcaacttttcttttgtcttctagccatagggcccaaagaacctgttgtaccagtttgaaacatgctttgagcatgcccagagagactgttcattaagatttatttagacatcagggcagtgattcacagtttgcaaaactcaaacccagccaatttctttctttctgcaggtgtgtctgacttgctgctccagggatgtcatagttaaagttgaccagatctgtcacaaaaatagcatcaagttctttacaggagatgtttttggctaccatggatacacatttgccaatctaggagagcatgagtttgtagagtaagtgttgggagaggaggggagaacataacattttctcctttttatactttttttttttaaattatgtatttatttatgtgtagagacaggatctatgctatgttgttcaagctggtcttgaactcctgggctcaagtgatcctcccaccttggcctcccaaagtgctgggattataggcatgatccactgcgcctggtctgctgacatgttttcaagttgagagatagtaaaatgattacaaaatagttgggcgattctggaggcatattcaaccaaagtctaccttggaaaaggtgtccaatatccagagagactcctctggtagaacaaacagacctcatcctctcattttgaacactgaggctgcagaacttggtaattcttacatgacaggacttgccgtgttttgactttgtagtctctaggtgaaagatggcagatgatacattattgtaaaactatatgagttaggtattttggctgcagtttctgaccaccccctccaaaaccctccaacttgctaattgagagggaaagacaggctctgtgagataggagcttcctaccaagagactgagaactcttctcttgttcagcctctcaggcaagtcactgaaatttctctggtctccaagtttcttgcctgtaaaatcaagatgggggaaggacagtcatgttccagacatctcctaactctagtgttttatggctttaggataatctagttctttgggcatattattattattattattttattttttgagacggagttttgctgttgttgcccaggctggagtgcaatggcaccatctcagttcagaacaatctctgcctcctgggttcaagccattctcctgcctcagcctccggagtagctgagattacaggcatgcgtcaccatgcctggctaattttgtatttttagtagagacagggtttttccatgttggtcaggctggtcttgaactccggacctcaggtgatccacccacctcggcctcccaaagtgctgggattacacaggcgtgagccaccgcacccggctattattattatttttgagacggagttttgcttttgtcacccaggctggagtgccatggcacgatcttggctcactgcaacctccacctcctggattcaagtggttctcctgcttcagcttcctgagtagctgggactgcaggcacccgccaccatgcccggcaaatttttgtatttttagcagagacggggtttcactatgttggctatgctggtcttgaactcctgacctcaggtggtccacccacctcagcttcacaaagtactaggattacagccaccatgcctggcttctttgggtatattataaagaagttatagtagtgggaagcaatccagattattttaacataagctgcccacagcagaggggcagaattaagtttggcttttttttttttttttttttttttttttttctgagacagactttcactcagttgcccaggctggagtacagtggcgtgatctcagctcattgcaacctcctcctcctggggtcaaccaattctcctgcctcagcctcccaagtagctgggattacaggcgcccaccaccacgcccggctagttttttgtatttttagtagagacggggttttgctatgttggccaggatggtctcaaacccttgacctcaggtgacacgcccgccttggcctcccacagtgctgggattacaggcgtgagccactgcacccagccaagtttggctatttatttcatgattcaagtagagtgtttacaaagtaatcactttgatttattgagagcagctgtgtgcccagcagtgtgctgagcaacttacgctgctctgtttttcccacaataatttcctgagtgcccaacagtgtaccagactcatcatgttatcaatggcagagctcgatttgaaccgagatctgactccaaagcttttgcccttaaccaccatcccgatctgtgacctggagaggctttttttgattccaataacatgattcctagggtaaaattacattctctccccttgtcaccctctagggagaaaactaaagttgccaaagttagccaaggagtagaagatgggcccgacaccaagagagcaaaacttgattcttctgagacaacgatggtcaaaaaggtatgtgtaacgtgggggcagaggtcagaaaccctggggccttggaggggtcaggcaatgacgattgaaaaggataagagcaagcacttcttgaaggggtggggcgggtgcttgtcccatctaaagggaggctgccacagcttagtgtcagccagctgttgctgtgagggaatgtgggcccagtgattccagatgggatttttcaagacaatgagaaatgcaaacttttgtaggctctgtcccaaacttttttttttgtgtgtgtgagatggaattttttcttgtcgctcaggctggagtgcaatggcatgatctcggctcactacagcctccacctcctgggttcaagcaattctcctgcctcatcctcccaagtagcacccctggctaatttttttttgtatttttagtagagacggggtttcaccatgttggccaggctggtctcgaactcctgacctcaggtgatccacccgcctcagcctcccaaagtgctgggattacaggcgtgagccaccatgcccggccccataccctttttttttttttttttgagatggagtcttgctgtgtccaggctggagtggcacaatctcagctcactgcaacctccacgtcccaggttcaagagattttcctgcctcagcctcccaagtagctgggactacaggtgtgtgccaccacacccagctaatttttgtatttttagtagagacggggttccaccatgttggccaggatggtatttatctcttgacctcgtggtccacctgcctcagccccacaaagtgctgggattacaggcatgagccaccatgcccgaccagaaaacttttttttttaaagcagcaaaacaccagccctgggttacagtagcaagaccccgtgtctacaaaaaaaatgtaaaaatttgtctggcgtgatggtgagcacctgtaggcccagctactcataggctgagctgggaggattgtttgagcctgggaggtggaggctgcagtgagccatggtcacaccactgcaccccaacctgggccacctagcaagatcctgtctaaaaaaaaaaaaagcaaaacaaaaaattttttgtattttctctactaacaatacaaaaattagctgggcaaggtggtgcgttgcttgtagtcccagctacttgggaggctgaggcaggagaatagcttgaactggggaggcggatgttgcagtgagccgagacggcaacactgcactccagcctggcgacagaacgagactctgtctccaaaaaaaaaagttttctttgcctgtttttttccttttgccaaataacctttaataagaaaaatccttcaatgttgtcttgctgtgtccaggctggagtggcacaatctcagctcactgcaacctccacgtcccaggttcaagagattttcctgcctcagcctcccaagtagctgggactacaggtgtgtgccaccacacccagctaatttttgtatttttagtagagatggggttccaccatgttggccaggatggtatgaatcctcagattcatatttgttaatgtagtttatattaggggctcagcctctatttggattaggtgcaataattacatttatagaaaggagtggagaagggatcagaagacgatggtttctgtagctagtgctggaatctgagatgggaaccatgcgatggggaaagcaagatgaaggggccagaattggtttcattgaactgagaggaaagacatgaccaagcccatatttactctttgctttgtagatttaaatgttgagaaagaaaaacagctggtcagaatgttgagttaaattacgctaacgaggggattctaaagagtgcagaaaccacaaaagagactgcagaaaaccacaaaagtggaactctcagactctccagcaaggcggcgttggagattttctttctcattttgtgtttgtgttggagtagtttggtgctgtaagtgtgatacagaggaattaagccctaattttagtgtctattcacagaaccataattatccagagtgaaccttggtgttttggccaaaacttgggtgcctttctttctttttgaggcccagtcaagatttatctgaatagctccgtgaatttggtggggggagataaattgttaacaaacggaggagtacaaaagctgctttgtgggtgctgtcagtttataaatcacaccctcttacaagtgtgacacttggccttggtgtgaagggttttatggcttaagggccttctctgattgaggcaggtctttcacattcaaatggagagagtgcctagctttgttagccattcacagctggaagtttccctggagtcagttctgatggtgcccactggggtggatctggaaacctcttttgggaaccactttatctcgctatgaggagaatgtgggcagcccaggcctttgcccaccattccggagggccctacaggcacagaggtttttgtgcagcctcttcctacgtggagctgagctggaaggtatcaaaatattccccagctgacattgttagtcagctgttacacttgaacaatgcaggctcggattccaaccccaagcccttaaggttacgaggcattcagtgcattcctgctgacaatccctgggattccaaaccttgcctttgtgcagcctcaccaagggccctgcggaccgactgggctggactgggttttggccatggctttgtcaccttgcaataacatgcctccttccgttttggcacagatggccctgtgatttcaaggttctcttccaacaccaaagattccttgattcagatgctgcccttttgcctaattgtacagaataactagttgggttgtgctcagagagtgcagggtgggggtggggaagcagctacttcctgtttcctgtgaaaggttttctggttagggttcccttcccctccccgctttccctaggtttaaccaaaggttgtaaagccacttttgcttcaaggtacactttgtgctcctaaattagtaacgttgaaaaacaaaaaggaaaaacagcctgtggttttcacaccctctaggaagctggtgggcctttctagcacctgtgccattctgataaataagggcttaggaaaatgcctagcccagaaataggtgctcagtagtttgtttgcttcctttggtgctcaggagaagatttgagacggatttcgtcacaatcaggtctcgggcacaagcctcacatggacactgacatgcaggagccagaggagacagcaatgaggtggtggtaaggaagtgcccaaaaaggtttcccagaggaagagttgtttgtgttggcatgtgagggacaagctttccaggcaccagagccaagagcagtgctctgtccgaggaagtaggataaaccgaaagacggacgtaggggcagagttgctgtggctgccctcactgccgcagccagctccttccatgagttgcagaatgcctactgtgtgcaaggcactgtgttgagtgcagggaatcacatccagtcttgttgtccccatctatagctgataaagaagctatgagaaattaagtgacctgaccaaggccacacagctgtggaagaaggggcgagagcatagacagtgggtaagggcataggctcaccctatgatttacaaagagggatacccctgaagttgctagggtaacgtgacatattaggaggatggtgggataaaatatgtgaacatcgggatcattctggaaaacctttaggataaaaggccactgtcatgctcccatgttcacgtttctttattgtgagttatctgtgttaggtgctgccagagatgatgagatgcctgacagtggttactctgtaatagctctttaaaaattaaagacaaagtagggtttgttcctgactgtactagaaatacagatttaattttacctctgctcctgaaataggtgactaatttggagtactattaatactcttttcatgaattagttgagaaattccacagttgaggagtgattcattcttttgactccctctttctgagcaatttgttgacagccttctcatcctctcttacacccgtcattaaagaaacagtcgagttctttttctttcatgtggtaccttggtttccactgctggtggcccttaggttgcttgtctctgtctccccgcttccattttaagctccatagggggaaggtagtcttgttcactgctagactcctagtccagtgtgtagcacagtcatatccacggaatatttgttcagtgtactggtggctgttaactgcagcataatccagcaaccctggagattattttcttcctttttttttttttttctttgaagcagggtctgactactctgtcacctaggctgaagtgcagtggttcaaacactgctcactgcagcctcccaagtagctggaattacagacatccactacacctggctaatttttaatttttaaaaattattattatttctgagatggagtcttgctgtgtcacccaggctggagtgcagtggcacaatctcagctcactgcagcctctgcctcctgggttcaagcaattctcctgcctcagcttccggagtagctggaactgccagtgtgtgccaccacactcgactggtttttgtatttttagtagagacggtatttctccatattggccaggctggtctcgaactcctggcctcaagtgatccgcccactttggcctcccaaagtactgggattataggcgtgagccacagcttccagcctgattgtttccattttaaaaaagagtaattgaagtaacctttgttaccaatgaaatgaattaaccttctagtatattaattctcacggtttaggttatttgaactaagctgagagaacagaataccaaagaagacaatagacttgcccagaaatatttagaagtaagtcactcagttgcctggattggaaccctcaggccagagaggttcaaaatcctgcatttttttttttttttttttttttttgagacagagtctcactctatcacccaagctggagtgcaatggtgcgatctcggctcactgcaacctccgcctcccgggtttaagcgattctcctgcgttagccttccgagtagctggaactacaggtgcgcgccaccacgcccagctaattttttttttttttttttttttttgagatggactctcgctctgtcgcccaggctggagtgcagtggtgcgatctcagctcactgcaagctccacctcctgggttcatgccgttctcctgcctcagcctcccgagtagctgggactacagatgcccgccgccatgcccgactaatttttttgtatttctagtagagatggggtttcaccgtgttagccaggatggtctcgatctcctgacctcgtgatccgcccacctcggcctcccaaagtgctgggattacaggcgtgagccaccgtgcccagcctaatttttgtatttttagtagaaacggggtttcaccatgttgaccaggatggtctcaatctcctgaccttgtgatccacccgcctcagcctcccaaagtgctgggattacaggcgtgagccaccactcctggccaatcctgctaattattaatatcagaactacttggttcaaaggagtggaaatagggcaacgaggggtgtaaatttgcagttaggtggaatgctgatagcaagttttccaggtaggagagttagttggggtgggggatgctaatgttagcttatctctgtatatatatttaattttatatgttatttatttttgagatgggatgtaactctgtagcccaggctggagtgcagtggcacaaacacagctcactgcagccttgaactcctgggctaaagggatcctcccacccacctcagtctccaaggtagctgggaccacaggcatgtgccaccatgctctgctaattttttcgggtttttttttttttttgagatctcttgctgtgttgcccaggctgatctcaaactcctggcctcaagtgatcctcttgccttggcctctcaaagtgctgagattataggcatgagccaccgtacccagcctatattttttttattgtgacatttaatgcacaaaagaagatatgcagcatcaatgcagataatggaacaaaacaaacactatccgccttaaaaacacaaatatttttggtacttttgtaccaatctgtatgctgtttctctatcttctacttcttctccctgtaccctcaccaggtaagtaaccccagagctgctggtacatttgtgtggattaaaaaagacacctggaaggggcagatacagccctgcttgacttcctgttttatcacgtgtttataaatctaaacaatgacatggaacttattatacaatattttaggcataaattaagaatgatttcgctcaccatcatagacctaccactcaatttgaagcatcaaacattactggtatggtgaggccctctggctgtccctccaacagaagttaccaccctcctcagttgggtttctcattcctatgcatttcttcttactacttatgtatgtatttccaagcaacacatagaattgctttgcatgctttttatcttcttaaaaattggttttatattgtatgcatggtgccacctgcttttaaggagaagcaacacgtttgtgaggccatctgtttatatgttgttctagggctttgctgtccattttggtagccactagccacagctggctgtttaaattaattaaaatcaaatcaaatcaaatatttagttcctcagtctcactggtcacatttcaagtggccagtaagcacatgtggccattggcatctgtattgcatagcacagattacattctgttccatcatcacagctagttctcttggacagccctgcagggcatttctttttggtttttgttttgtttttatttttgttttttgctagagtctttgttgtgtaaatacattactattttatatccatttttctatttataagcatttgggtatgctcataatttgctgttacaaattgtgctgcataagcattttgtttgtgtgtgtatagatgatctccttgggcaattgtgttaatttctcttgggtatatacctgggagtaaaattaagataagggcattttcagctttaccagaccccgttaagttactctcaagtggttttatcaatttatattctagaaccaacattatgtatcagtaacatttggtaacttcaggcgttttttttccattctgctgagtgtgaaaaatgtgttttgattatggttgtcatttgttagaatactttgttaaagctttttaaagattcttggtccctctaccctccccaccccctaccccaggaattttgattgggtaggacctggggattatattcatctttatatgcagaattatattacttgttactgttaggcctgatttaagaagtaaaataaggctgggtgcagtggctcatgcctgtaatcccagcactttgggaagccaaagtgggcacatcacttgagcccaggagtttgagaccagcctgggcaatgtggctaaaaccccttctctaccaaaaatacaaaaattagctgggcgtggtagcacgtgccagtggtctcagctactggggaagctgaggcgggaggattgcctgagcctggcaagtgtaggcagcagtgagctgagattgtgccactgtagtacatcctgggtgacagagcaacacactgtctcaaaaaaaaatttttttttaagtaaaataagttcataattccaaatgtggaaaatgcagaacaagttaatgaaatgttaatcctactaccaaatgataactataaccttcctttcagtatttttctatgtatatacaacaaaattggggcactgtttaatacagataatatatatagttagctctccttattaatgggcttcacattcatggattcaaccaactgtggatcaaaaatctttagtgtgcttggagtacatccaaaaaaaaaaaaagaaaattgaaattatgttaataataaaatatttgggaaaaaacattgcgtctatctgtaccaaacatgtacagactttttttcttgtcattattccctaagcaatacaatataacaactgtttacatagcaattccattaggtattataagtaatctagagatgatttaaagtatatgggaggccaggcgcagtgcctcacgcctgaaatcccagcactttgggaggccaaggcgggtggatcacttgaggtcaggagttggagaccagcctggccaacatggtgaaaccccatctctaacagaaatacaaaattagctgggcatggtggctcacacctgtaatcccagctactcaggaggctgaggcaggagaatcacttgaacttgggaggcagaggttgcagtgagccaagatcgcaccgttgcactccagcctgggcgacagagcaagactctatctcaaaaataaataaataaataaagtatatgggaggatgcacgtagagtatatgcaagtactgtgccatttatttatttagagacagagtcttgctttattgcccaggctggagcgcagtggcgtgatctccgtctcccaggttcaagtgatcctctggcctcagcctcccgagtagctgggattacaggcttgtgctaccacacccggctaagttttgtattttaagtagagggcgttttcaccttgttcgccaggctggtctcgaactcctgacctcaggtgatccgcccacatcggcctcccaaagttttgggattacaggcgtgagccattgcacctggcttgtatatgtgtatatatatgtacatggttttgtcttttgcttttttcactcaataagcattccccaaatctgctttggagcacatgattttattttatttttatttttttatttttttgagacgaagtctcgatctgtcgcccaggctggagtgcagtggcgcaatctcggctcactgcaagctctgcctcctgggttcacgccattctcctgcctcagcctcccgagtagctgggactacagacacccgccaccacacccggctaattttttgtatttttagtagagacgggtttcaccgtgttagctaggatggtctccatctgctgacctcgtgatccgcccgccttggcctcccaaagtgctgggattacaggcatgagccaccacgtctggcctggagcgcgtgattttaaatgtctgtgtcatttttcctcttcttgcctagccataatctattttaccagtcacctattgtattgaggttattgaggttattgcagtttcctactatgctaaatggctcctgacaacaaatttgatggttgatgggctatgtggagaattcacctttttttttttttttttttttttttttgagacagagtctttctctgtcacccaggcgggagtgcagtggcatgatctcagctcactgcaacctctgcctcccaggttcaagcgattctcctgcctcagcctcctgagtagatggaactacaggcacctgccaccacgcccagctaattttatttttgtatttttagtagagagggggtttcaccgtgttagccaggatggtctcgatctcctgacctcgtgatccgcctgcctcagcctcccaaagtgctgggattacaggcgtgagccacagtgcccggctaatttttgtatttttagtagagacggagtttcaccatattggccaggctggtctcgaactccagaccttgtgatccactcaccttggcctcccaaagtgctgggattacaggcatgagccaagtctttttttttttttttttttttttttgagacggagtcttgctctcttgcccaggctggagtacagtggtttgattgtgatctcggctcactgcaacctcagcctcctgggttcaagcgattctcctgtctcagcctcccaagtagctgggattacaggcacatgccaccatgtccggctaatttttatatttttagtggagacggggtttcaccatgttggccaggctggtctcgaactcctgacctcaggtggtctacccaccttggcctcccaaagtgctgggattataggtgtgagccaccgcacccggccttgttattagtcttaactagattgttgattgaagtccttaagcccagaaatgtatgtgaaggatggtggagaagagtggctcaggcattctaggcagaggtattcttgagctgaggaagtggaggagaggaggtatgtaagttacctgttttcaggggttcattccagtggatagtggatgccactccctggcagacactgtgggtgcctcacctgaaagactcctgattccctgaaggcattgtcgggtgtattttttctttataagcgtaatgccagtggagtgggtaagacaggtaccaccttttgcatctgctgctacagattaggcagcttggttaagttttgttttgtttttaattgttatgagttagtttgaaccaaaaggattgttaagtggagtgtaagaagcactgaataactactgttatctgagaggagtagtaaagaccagggccactgggcaatcccagaggcattaggaatttgtggcctttccctttagagcattgtcattatgtgtatctgcatctctgcattccaactttcacattttcagttcccaggagagagaatctgattggcctggttggggtcctgtgcccacttctggctgtcacctgtggctttcttccctcagttgtagaccacactctggatacctgggacccctgaaatctcctgcccagacaaccccaagcttctcaggactttttgtgggctgcttccctgttctgcctgtgcagtgcaggccttgtcacaatgtctgaatgcttaggccagagacgtgggggtttggtgagaaaggatgagctgggtagctacactcaagtgcagagccaccagtattgtgggacagagccaggcatgggaagagaagtgggcacggatgggggccagctttcccgatgtgccttaatctggcacagaactcctaaggagtgtgaaaatttcaaatttgatccaggccttccaggtggttatgaagaaggcgagtttgtcaagacaggataatacaatatacttcatttaatagcttgttagtgtgatttataactaaatatgtagacatcatatatgggtcttcattcatactcttgccccaggccctgaaagtgttagctaacaggcaagacctgcctgggactgagattctaaaacacaacctccacccccaactccgtttcatcatatagtagcctaacatattagttggttcgttgcttatagtcaggcaaacaacaaagactccgaattgagctcttggtaatttttgaaacctgcctggtaatactgtgtttcctcattctgatggcattcccagaccatattgcaaatgacttgatgtgtattttcagacttgttgagaagggcctggtggtctatatagcaggcataaaatgtcaccaggccgacttcatgacttatcttttgaggtcaaacagacccattgaccaaaagatttgagggcagtgaaaacatcttgtatactatctttaacaatggatttaactcctaaaggaaagccacctaaacatgactgtttaatcttcactagcaatttgaacttttttttttttgagacggcgtctcaccttgttgcccaggctggagtgtagtggtgtgaccttggctcgctgcaacctccacctcctgggtccaagtgattctgctccctcagcttcctgagcagctgggattacaggtgcctgccaccacacccagctaatttttttgtatttttagtagagacagggtttcaccgtgttggccaggctggtctccaattcctgacctctagtgatccacccgccttggcctcccaaaatgctaggattacaggtgtgagccaccacacccggcctgcgcccagataatttttgtattttttttttttttgagagtctcgctctgtcccccaggctggggtgtagtggcacgatgggttcacgccattctcctgcctcagcctcccgagtagctgggactgcaggtgcctgccaccacgcctggctaatttttttgtatttttagtagagacggagtttcgccatgttagccaggatggtctcgatctcctgaccttgtgatctgcccgccttggcctcccaaagtgctgggattacaggtgtgagccactgcgcccagccaacaatttgaacttttatctgtcaaatctatatgcatccttagcaagctttgtaaactgcctggtaactgatagatcttggttcacttagcttcccaaattatgctgttatcatcttgtctctctgttctttaaatatctggttgggagggtatggagagagagggaggaagaaagacacctctgtaagtttgaaattatttgcatcccccccaccgcccaccaccaacctttttaaaatatagagacacagagtctataccacgcctggcctaaaataattttttttagagacgggatctaacagtgttcccccagcttggctatcttaaacttcttaagggtagctagttctaagaactgcttttttctggctaggcacagtggctcacgcctataatcccaacactttgggagaccgaggcaggcagatcacctaaggtcaggagtttgagactagcctgggcaatatagtgaaatcctgtctctactaaaaatacaaaaattagctgggcgtggtggcatgcatctgtaatcccagctactgggggcgctgaggcacgagaattgcttgaacccaggacacggaggttgcagcgagctgagatcatgcactgcactccagcctgggtgacagagggggagactgtctggaaaaaaaaaatgtttaaaacaaaaaactgtttttttgtatgtgtgtttatatgcgaaccatttgtgaaagtggtcccagcatgatgccacatgtgtcatttccaaatatttcagtctgtatttttttctctctctctctgttttttctgtcacccaggctggagtgcagtggtacgatctggctcactgcagcctcgacctcctgtgctaaaacagttctcttgcctcagcctcctgtgaagctggtaccacaggtgcatgccactgcacccagctaacttgtagagattggggtctcactttgttgcccaggctgttatttgactcctggactcaggtgatcatgccactttggcctgccagagtgctgagattacaaaagtgagccaccacactcagccataaatgtgttgttgttgttgtttttgagacagagtttcgctcttgttgctgaggctggagtgcaatggcgcgatctcagctcactgcaacctcccccctcctaggttcaagcgattctcctgcctcagcctcccaggtagttgggattacaggtgcctgccaccacgtccaactaatttttgtatttttaatagagacggggtttcactatgttggtcaggctggtcttgaactcctgacctcaggcgatccacccgcctcggcctcccaaagtgctaggatcacaggcgtgagccactgtgcctggacttgtaaatggtatttcaaagtaaaatatatgtcattgcatttatcaagataatttgattgagctttgtaggtcctagccatccttctgcctattactgggctttttgcaaatgctgttcctgtttccacaacctggagcattgtcccatcccttttattgtttctcttgctgttatttattatgtcatccatcatcattataccattcctctgccaagaaacatttaatttttgtttttgtttactattacaaaaatgttttatagaatattgttagacttacattcttgcccctcattgtggaagtattcctgtagtatgaatacagccagaggttttttagttttgttttggtttttttgaggagtcttactccttcatccagaggctggagtgcagtgacgcgatcttggctcgctgcaaactccacctcctgggttcaagcgattctcctgcctcagcctcccaagtatctgggactacaggcggccgccagcatgcctagctaatttttgtatatttgtagagacgggggtttcaccatgttggccaggctggtctcgaactcctgacctcatgtgatccgcctgcctcggtctccaaagtgttgggattacaggtgtgacccaccgcgcctggcccagtgagagttaaagggccagagtggaagcaggtctttggaagcttggctctgtcttccttcagtgcagggagtttgtgttgtccatccccagcctctacagaagcacacagtgagtgttcaataagcatttcttggatcaaatggcccctgcttcttttaatggtcagtaaactttaaataatgagatttttctgcaatagagaagagcaactgccttgtgattggaagccagcatatgttattcctaagcagttctgccttttttccacagaaggtggtcttctgccctgttaaagaagccctggaggtggactggagcagtgagaaagcaaaggctgctctgaagcgcacgacctccgactactttctccttcaaggtgaggtctcaaagcacaacttaccccgggagagcttttggctctgatttctgcaaatgtggttgcaaggtccagatggttttgtgatgtttgccttgggtggcattcttcattggctagttctcagtgatcacttgagaaaggggtggtcacttgaagggggtgaggtctaccattgagctctgggttctaatgacttctcctttttttacttgttgaaatgacctccctgtcaagttgaccttatggtaatagtgttacaggtcacagattgagaaacctctttttttttcttttttctttttttgagacagagtcttgctctgtcacccagactggagtgcagtggggtgcaatcttggctcactgcaacctccacctcctgggttgaagcgattctggtgtcttagtgtccccagaagctgggatgacaggcatgcaccactgcgcccggctaatttttgtattttgagtagagatggggtttcaccatgatgcccaggccctgaagttctgagattataggcatgagccaccatgtgaagcctgatcaaccaacttctcttcaccgccccccgcctttttttttttttttttttttgagacagagtcttgctctgtcacccaggctggaatgcagtagcgctatcatggttcactgtagcctctacttcctgggcttaagtgctccccatgcctcaggctcctgagtagctggtactacaagcacacgccactgtgcccagctagtttttgtatttttttgtagaagcgaagtttctccatgtagccaggctggacttgaactcctgagctctagtgaaatccccgcgttggccttccaaagtgctggagttaaaggcgtaagccaccagtgcttgttcccctcttcagaattctttctctgcctcaaaaccatcctcacgcttatgaaaggtggggttgtttttcctcttgctattaatgaactacttatcagtccatctttgctggtggtcaagagactgttagtaagtattggttggcttttcagtgttcttcctgtacctggcacttttttgtttgtttttgagatggagtctcgctctgtccccaggctggagtgcagtggtgtgatcttggctcactgtaacctctgcctcctgggttcaagcgattcttctgcctcagcctcccgagtagctgggactgcaggcgcgtgccaccacacccagctaatttttatatttttagtagagacagggtttcaccatgttggccaggttgggctcactctcttgacctcgtgatccgcccacctcagccccccaaagtgctgtgattacaggtgtgagccaccgcgcctggcaaacctggcacttttaatttttattttaattttttttttggagacggagtctagctctgtcgcccaggctggagtgcagtggcacgatcttggcacactgcaacctctgcctcccaggctcaagcaattctcctgcctcagcctcccgagtagctgaaatacaggcgggcaccaccatgcccagctaattttctttttttttgagatggagtctcactctgttgcccaggagagcagtggcgtgatcttggctcactgcaacctccacctcccaggttcaagcgattctcctgcctcagcatcctgagtagctgggatcacaggcacctgccaccacgcttggctaattttttgtatttttagtatttttgtattttttttgtattttcaccatcttggccaggctggtctcgaactcctgacctcaggtgatctgcccacctcagtctcccaaagtgttgggattacagacgtgagccactgcacctggctgcgctaatttttgtattttagtagagacagggtttcaccatgttggccaggctggtcttgaactcctgaccccaggtgatctgcccacctcagcctcccaaagtgctgggattacaggcatggtagttttttaaaaagtattttttttaatgttatttatgcatttatttttttgagacggagtctcactctgtcacccaggctggagtgcagtggtgcaatcttggctcactgcaacctccacctcccggttcaaacagtttccccgcctcagcctcccgagtagctgggattacaggtgcccaccagcacacccagctaatttttgtatttttagtagaaacggggtttcaccatgttggccaggctggcctcaaactcccaacctcagatgatccacctgcctcggcctcccgaagtgctgggattacaggcgtgagccaccacgctcagctggatgaactatttgaaagtcccgaatatccatttgtgtagaaataaatgggttgagcaggaatgagtgttgcatgtgagtgggctgcactcagaaaatgcctcctcttgatagtgggatcaggtgtggaagaggcaccagcagtaagagcagagtcttttccatgtgggaacagtgcctgggccctttgggagaagcttgttgctcactgcctcgcacatagaaagccctcaggaaacaatggcgctaatttgccaaggtttgggtttgacttgagcatctctaactgctgcttatgaaaggagtcaactgggctgggctactaaaaatacaaaaattagccggatgaggtggtgtgcgcctgtaatcccagctactcgggaggctgaggcagaagcacttaaacctaggaggcaaaagttgcagaatccgagatcatgccaaagcactccagcctgggtgacagagctgaactccatctccaaaaaaaagggggagaaacagagtcaatcacagatcatctactccagagttgaaaagtgtacacgccaaaaaaaaaaaagagaaaagaaaaaaagcacatatcttcacggatgacagagttctctaggacttgctctgtgccgggcgttttccatgtatatcaccttcatctcacaaaggccctcaggcaagtgctattaacaccaccagctacagaggggaatctgaggctcagggaatttaaagtcagtggctcaagatcacccatctaaaacaaaatggcagtgcccactggaagccaggtctgttttgattccaaaggtcttgttctttttctttttccccagagacagagtcttgctctatcacccaggtaggagtgcagtggggcgatcttggctcactgcaacttctgcctcctgggttcgagcgattctacaggcacgcaccaccacacccagctaatttttgtattcttagtagaggcagggttccaccgtgttggccaggctggtctcgaactcttgacctcgtgaaccgcctgcctcggcctcccaaagtgctgggattagaggcgtgagccaccgcgcccggcccaaagtcttgttcggaacaaccatgcaccactgcctgccacagaagtcatatagctactgtttcttcctcaaccacctgtccacccctccaaccccgtaacttctgatgctgatgtccagtagcacctgcactgaatattcactttgctcctagatatcagttttgtcccctcagttcaatgacccctgtgatgttgagatggatgagaaaatactctggaaactgcagaggataaaatcaggatttcctcacttcagcacactactgacattctgtgctggataacactgtcacgggggactgtcctgtgcactgtgggatatttagtaacacccctatcctctactcactagatgccagtaatatctccccacccagctctaacatcaaaaaatgtttccagacaccactgccacatgtccccagttgagaaccactggattatgctaaactcaaaggccagttgactcctttcttttctttcttttcttttttttttttttttgagacggagtctctctctgtcacccaggctggagtgcagtggtgcaatctcagctcactgcaagctcagcctcctgggttcacgccattctcctgcctcagcctcccgactagctgggactacaggcgcctgccactatgcctggctaattttttgtatttttagtagagacggggtttcaccgcgttagccaggatggtctcgaactcctgacctcgtgatccacccgcctcggcctcccaaagtgctgggattacagacgtgagccacttcgcccagcctgtttacccttaattccatccctcagtgggtattatggcaacagtctcatgagtgcctatgaccctttgctggataatatatcctatcatgtttaccactctctcccagatggcattaattatctgtctttttcagttttgagttccagggctttggatatggtaatcaaaacattaaaactatgtgcagtaaatttcttttcttttttctttttctttttttttttttttggtgtggtgaaaagcacataacataaaatttaccattataacttaagcgtataggtcagtaataatcatacaatgttttattttattttgtttttttctgagatggagtttcgctcttgttgaccaggctggagtgcaatggtgcgatctcggttcaccacaacctccacctcccaggtttaagcaattctcctgcctcagccttctgagtagctgggattacaggcatatgtcaccacgcctggcaaatttttttttttttttttttttttttgtgagacggagtctcgctctgtctcccagcctggagtgcagtggcatgatctcagctcactgcaagctctgcctcccgggttcacgccattctcctgcctcagcctcccgagtagctgggactacaggtgcccgccaccatgcccggctaatttttttgtatttttagtagagacggggtttcaccatgttagccaggatggtctcgatgttctgacctcgtgatccgcctgcctcagcctcccaaagtgctgggattacaggcgtgagccaccgcgcctggccacatttttgtatttttagtagagacggggtttcaccatgttggccaggctggtctcaaactcctgacctcaggtgatcctcctgcctcggtctcccaaagtgctgagattacaggcgtgaggcaccgtgcccggcagtgagaacatttacaatcacatattgtgtagcatcaggaaggatttttaagatcaaagttagcacattagaagtggaaataatttaaaagtggccttgattttttttttttttttttttttttgcctactgtaaagtcaagcctcagtaacattctgatttcaggatgcagggtggctttgggggatatccaagttgagtggtaaactttgtaggcactactcttgtttccatgttcctggcacctaagttgatatattttctcacagtcttgtgacaatctttgaagtatagttgttatcccattttcctataaggagaccaaggttgagcatggttgtgattgccgaaagtcatatccgtggttttatagacagtcagaatttagaccatgaggtttgttttacctgtggacttagttttcaacatatttaagatatatctgtagtctgggcgcggtggcttatgcctgtaatcccagcacattgtgaggctgaggtgggcagatcatttgaagtcaggagttcgagggcagcctggccaagatggtgaaatcccgtctctactaaaaaacacaaaaattagccaggcatggtggcacatgcctgtagtcccagctacttgggaggctgaggtgagagaatctcttgaacctaggaggcaaggttgcagtgagccgagatcgtgccactgcactccagcctgggcaacagaacgagactctgtctcaaaataaaataaataaaatatctctaaactaatatatctcattaaatttcagatctggagttctgtgagttagggaaacaggatcaccaccatagtagaaaaaactctggtgcagatagttttagacacaaagattatctgaattcaggcccagataattgtcttctttttccccaagaaacatttgaattgtatttctgttagataagcatcatagtaaaaagtcttcaaagtttttgaaggcagaaaaagttttctttgttaaacccttcccatttttttgtcttctaaatttctaggagaactactgttaagttttttagtatcttgttgaacaatggttaacaattataatcatttgtgtttatgtaatcaaactgtgaaacaccggttgggaacttgcttgtgtacacttgatggcgtaaatggtaggggaagagcatacatacaaaagtggcctcttttgctttcttggcagcatgatgttatattcctttggatgtaccgtcatctatgaccagtctcatcttgaaaggcatgcttattttccatttttcccagtgcttggaatttgtttccaaaattgtttctaggaacatgactaatgtgactgacgatgccttaggaattcctagtggggacaaggtgcttggctgggatgcatacctaagaatatctcacaaagaaacctgattttgtttcactattgcctaatggcgcacatagtaggtgctcaataaataaatattttttgcatgagtggtttttgcttgtctggtcatttgccctattgtagagggagagtagtgtgcccactggagtccccacagggtccttttgcctgcatgcctacccctgtggcacccatcaggcttttgattccaatgttgccctgggctctcactcacaggtagatgttttttattgccccattcacaattcagccacctgctgtccgcatgcatgtgcttgccatgtttagatattgggtgtttttccagtttacttaataagttagtggccagactgtacgcttcctgctgcatttttccactgtcttgagagttggcctcgccatctgtgagcaaaaggtctcttctttttattattctcccatggcatgttgcaaaacagtaagcgtgagctggtttcctgtggcaaaaaaatgactttgatttgttctttttgaggttactgtgagtttatcataacaggagtgctaaaaataccgagtctggtatggaaacagcattcacttaccagcatgaacaataacatacaggtttagcctagagcaggaagaaatggacttcatctcaagatgagaatacttatcagagaattcttggcaatcttaacttgctcagtctctgttctgatgagttatggaaaagtacttagaccatctttgagccacagaattgaagctgaaaatattcttagaccaaacattttgtgagcacctgctatgtaccagatctcatagctgggactaatcagaggaagaggaatagaataagtgttcttgccaatgtgaaagacaaacaaataattctactccttgtgaggacagctataacagagggctatagaaactatcatgtgttgttcctggtttttgtttgttttttttcccccccaaaacagggtcttgctctgctttccaggctggagtgtggtggcacaatcataactcactatagccttgaactcctgggctcaagttatcctctcacctcgacctgcaaagtagctgggactacaggcgtgtgccaccatgtccagctattttaaaaaatctgtttgtacagattggggcagggaggtcttgctatgttgcccaggctggccttgaactcctggcctcaagaaatcctctcacctcagtttcccaaagagggactataggaaagcaccaccctgcctggctcgttgttctgtttttaaatacatttgcattattccataataatcaaagtaatttattatgggaacttaggaaactgaaggtctgaccatctttggggagttgtgaagtcttgacagaggaggggagatctgagctgtatttctcggaacaggtatttgccaggtgggaaagagggaagaatattgcagagcaacacatgcacagggccagcaggatagaggctgagcctcggaggggactggagcttggagagagcaggctagtggtttccctattgatagaatatcagaatctggccaggcgcggtggctcacgcctgtaatcccagcactttgagagactgaggtgggcagatcatgaggtcaagagatcgagaccatcctggccaacatagtgaaaccccatctctactaaaaatacaaaaattagctgggcatggtggtgtgcgcctgtagtcccagctactcgggagggggaggcaggagaatcgcttgaaaacctggaaggcagaggttgcagtgagctgaggtcgcgccactgcactccagcctgacgacagggcaagactccatctccaaaaaaaaaaaagaaatctatctatctatcagtcagaatcactgaggaaaccgttgaaaaatgcggagtgcctgcttgtagctcacattactgaatccagatagctaggagtgacttgcatgtctgcatttttctatagcacccaggtttctcaaatcagccaagttaggggaaagtactgtcataggaaagggaagcccatttcccaggtcaaagcctttgcttactcgtttatgtttattttatttttgagacagagtctagctttgttgcccaggctggagttgcaggtgcaatctcagctcattgcaacctccgccttttggattcgtgcaattctcctgcctcagcctccaagtagtggggatcacaggcacacgccaccatgcctggctaatttttgtatttttagtggagacagggtttcgccatgttggccaggctggtctcgaactcttgacctcaagtgatccatgcacctcggccttccaggtgctgagtttataggcatgagccatcgtgcatagcctgcgtttttcttttaaaatgtgttaagcactgtatttcaaattacatttgtgcactgaagcagggaggaaaaaggagctaacccaagtagctgttcaatatagtattttgactgcataccctcaaagtaaagaaaaatctcacctggcgcggtggcttatgcctgtaatcccagcactttgggaggctgaggtgggtggctcacagggtcaggagatcgagaccatcctggctgacacggtgaaacctcgtctctactaaaaatacaaaaattagccgggcgtggtggcgggcgtctgtagtctcagctacttgggaggctgaggcaggagaatggtgtgaacccgggaggcagagcttgcagtgagccgagatctcaccactgcactccagcatgggcgacagaacaaggctctgtctccaaaaaaaaaaaaaaaagaaagaaaaatctctagccggtcgcgatggctcacgcctgtaatcctagcactttgggaggctgaagcaggtggattgcctgagctcagaagtttgagaccagcctgggcaacatggtgaaaccctgtctctactaaagtacaaaaaaattagccagacatggtggcacactcctataatcctagctacttgggaggctgaggcaggagaattgcttgaaccctggaggcagaggttgcagtgagccgaggttgctccattgcactccagcctgggtgacagagcatcttaagaaaaaaaaaaaaagaaaaactctaaataaatattgaactctgcttagtagggattttgttttcagatgaggtcttgctctgtaccccaggctggagtgcagtgtcacgatcataacttactgcagcttctccctcccagctcaagcaatcctcacatcacagcctcccaagtagctgggattataggcaagtagcagggattacaggcatgcaataccacacccagctgattttggtattatttgtagagacggggtttcactgtgttgcccagggtagtctctgtctcctgggctgaagtgagcctcctgcccaaagtgttgggattacaggtgtgagccactttgcctggcctagtaggtttgtttttcacagtgataggggttagcaattctgaaactacttactgttcttctaagattgagcagataggtaagtatagtgttaatagtgagaatcaagttttcttattgtcagaaaagggtgttcctatgaatgtggacagtgggaaaggctagaaggagccatgtggtattggattggaattgaagttatctggatgaactcatggtttcttatacgtagatgtagtaatagatgtatgtgtgtatgcatatccacttttacacgtgtttatttcctagaattgtttcctagaattgttgagagggtttatgcccagagacatcccagaagcactgaacgcactcatgccaagatgttaatacctttcctcactaaagagaaaccagggttccttggagaaatggctgtttccagatctggggtaggaaaattacaggtgagcttggaatatcctgctatgccagaaagtaaggaagtgctctaagaatgataggggcatgtcaaaagaacaagaagaataatcaattaatgtaaacaaggaattatgaagataacaaagtctatctttgactatcaccatagtagtaacaattgtttcaatcaagaatcaaagtgctaaaatcaatggggaacagtttgcggtgaaacagtgtagatgtttccttatcagatgcttttatgctatgcctggtggctcacccctataaatcccaagaggctgaggcaaattgatcacttgcacccaggagttttgagaccagcctgggcaacaaaacgagaccccatctctacaaaaaataaaaaagttagccagatacagtggtgcatgcatgtagtcctagctactcaggaggatgagatgggaggatcggttgagcgcaggaggtcgaagctgcagtgagttgtgattgcaccactgcactccagcctgggagcaagactttgtctcccccgaaaaagaagatgcttttaaatgaattacatagagagacattggagaaccctggcaggttgtacctcagctgagtgatgaaattaacaatctagggatggacagttagacctcatgcctcttggaatatgtaaccctgggttggatctgagaatagaggaaggttttttttcttttgctctaaaggatgttagtggaacaattggtaaaaagaggccccggcgtggtggctcacgcctataatcccagcactttgggaagccgaggcaggtggatcacctgaggtcgggagttcgagaccagcctgcccaacatggagaaaccccatctctactaaaaatacaaaattagccaggcgtggtggtgcatgcctgtaatcccagctacttgggaagctgaggcaggagaatcgcttgaacccaggaggcggaggttgtggtgagccgagatcgcgccattgcactccagcttgggcaacaagagcgaaactctatctcaaaatagtaataataataataaaataaaaaacaaataaaaaggtctgtaggttagatagcagtactgtttccatgttatttatttttacagttatgataattgtctcatggttatttaagagaatggtttttgttttgtttttcttgttttttcttttccttttttttttttttttttttgagatggagtctcactctgtcgcccatgctggagtgcagtggcatcatctcggctcactgcaagctccacctcataggtttacgccattctcctgcctccccctcccaggtagctgggactacaggtgcccgccaccacacctggctaatttttgtatttttggtagagatggggtttcgccatgttagccaggctggtctcgaactcctagcctcaggtgatcctcccacctcagcctcctgaagtgctgggattataagtgtgagccagtgcacctggcctctttttttttttttttttttttaattttacagaattttttttttttttaagacagagtcttgctctaaggctgtagtgcagtggtatgatcacagcttgctgcagcctcagcctcctggactcaagcgatcctcccacatcacccttctgagtaggtgggattattgtaggctaaatttttaattttattgtagagaggcctcactccatggcctaggctggtcttgaactcctgggctcaagtgatcctcccacttctgcctcccaaagcattgggataacagacgtgagccactgcacccagcctgttagataatttagaaaattttctttcctcattcttcaatttcccctcattcacactcccaactttcctgttttgtgatttttaaatgacgttgtctttggatgccggctggatttggtgattagttctcttcagaagaaacttcttattttagaacttgtaacctttgcaaagcaggccataggcagccatcgctatttgggtatgacattccccagtgggtttttggtgtccagtaatgacaaaaactgctgagaaagagacagccacagggaaatgggttccgataatggggcagcagctgagtgcttgttgatttgctgctgtcatgaccacagatgtttaaaaataatttgtaaggaaaaagaaaaaagcgtagtgtgtgtgtgtgtgtgtgtgtgtgtgtgtgtgcgcgcacgcacgcgcgcgcgcacaccactgccttatcagtggtagagaatgcagaccacagtcattcagaaaggaagaaggcaccaccatggaaacaggagaggtgaggagaagggcagaggtgacccacaaatgcggctcagtgccttacagcagagagctcatgagagaacagaactggttagtcaccgactctgctcctcggtctgcaagagaggttcagcaccaagtctatactacacagtactggaaggattagatgaaggcctggcacacattgtgaattaatagttactggttacaggcggggtgtggtggctcaggcttgtaatcccagccctttgggaggccaaagtgggaggattgcttgaggccaatagtccaagaccaacatgggcaacatagcaacaccctgtctctttttttgactgtttttttgaaacagtctcgttctgtcagccaggctggagtgcagtggcacaatcttggctcactgcaacctctgcctcccaggttcaagcaattctcctgcctctgcctcccgagtagctgggattacaggtgcctaccaccacgtccggctaatttttgtatttttagtggagatgggctttcaccatgttggccaggctggtctcaaactcttgacctcaggtgatccacccaccttggcctcccaaagtgctgggattacaggcgtgagccactgtgcctgaccggttcacgtactttacatgcattgtgatcatattaaatcttcatgacagccttactagatcaggtcttgtcctgttttcacatgaggaaattgaatcttggaagggctaagtcatttgtccagggtcatcacacgcagtaagtgttagagtctaaacgagccagagctgtcacactgtcatccccagggccttgtgtttaagcatcgcccaacaaagtgctcagtcagactttaattattagcattactaataataccattatgatgattattttgtctaaacttcacaggcacctcgtgacattttcttattccacttttgcagatgggaaactgaggcccaccaagatcagattacaataatgggcaacattgtcagcaacctgccttgctttttttcttagcaggcccacatctcccccactcccccacccacttggcagtagcctgtgtttgagctgctcacaggccccaaggcccagctgcaattcttgtttaaagcctcacatcttttctctgactgtcagacaacagtcacgggaatgtcctgtgccatcttccctcggcaagaggggttggcagagagcagcagatgcctagagtcaaggtcatgtgctgctcaagtgctgggctggagacaagaccctctctccctgctgcttgtgaccaggcagggtggctctgaatgtagagggctctgtcagaacagttctgtgaccagagggtgtggttggcaaagcaatgcattaggggcccatggaagtttattcttgttgtccacattatttccctgtgacttttagatttttttttcctttttgtaaattagttttttcatactagttagaatgtttcaccttaaaggtgagagtcaagctctggaatcgcctgacatttttaaggaaaggaatagaatattgggctggggctagtctgaaatggtggtttgtattattttaaattgatgggctctgggttaggggagccaaatccattttaaagtgatttttgtaaaaattggcatgtcttctgtttcttctcttttccaaaggtgacactataacgtagaggttaagaatgtggtgacttttaaatccgtcgtgaccataagcctctcctaagccccagttttcctaccactaaaatgggggtggtaacagttgtacctacctcattctgtcttttttgttttttgcttgtttgtttgttttttagatggagtcttgctcttgtcgcccaggctggagtgcaatggtgtgattttggctcattgcaacctccacctcctgggttcaagcgattctcctgcctcaacttcccgagtagctgggatgacaggcacccgccaccatgcccatttagtttttgtatttttagtagagatggggtttcaccacgttggccaggctactcttgaactcctgacctcaggtgatccacccacctcagcctcccaaagtgctgggattacaggcgtgagccaccactgccggcctcgttctgtcgtatttttttacgtaggagagctcagtctgaatgtaggatatgacatggttgtggggttttttttgtttttgttttgtttttgttttgttttgttttgttttgttttgttttgttttgtttttgagacagtctcactctgtcccccaggctggagtgcagtggtgtgatagctcactgaaacctctacctcccaagttcaagcgattctcctgcctcagcccccaagtagctggaattacaggtgcccaccaccatgcccagctaatttttgtagttttagtagagatgaggtttcaccatgttggccaggctgctctcgaactcctgacctcgggtgatccacccgcctcggccttccaagtactgggattataggcgtacttggaaggtaccatgcccggccattatatgctttttaaaaaaacctaaatgttgcaaaaaacatgtgtctaaaatctctgtttcaacatagttttttaatagccatgtaatattccattctgtcaatatgtctttatatgtggtacagactgagtgtctaaatccaagaacccaaaatctgaatttttttttatttttcatttttatttgtttacttatttttgagacagagtcttgctctgtcacccaggttggagtgcggtggtgtgtcggctcactgcgacctccacctcccaggttcaagtgattttcctgcctcagcttcccaagtagctgggattacaggtgcccgccaccatgcctggctaattttttgtatttttagtggacacgaggtttcaccgtgttggccaggctgatcctgaactcctgacctcaagtaatcctcccacctctgtctaccaaagtgctgggattacaggctgagctactgcgcccagcctatttttgtttttttgagacagagtctcactgtgtctcccaggctagagtacagtagccccatctctgctcactgcaacctccgcctcctgggttcaagtgattctcctgccttagtctcctgagtacctgggattacagacgtgtgccaccacacccggctaatttttgtatttttagtagagacagggtttcactatgttggccagcctgatcttgaactactgacctcaagtgatccacccatctcagcctcccaaagtgctgggattacaggcatgagccaccgcaccaagcccccaaaatctgaaatgttttgagtgccgacataacactcaaaaaaatgcttattggccccgggcgtggtggctcatgcctgtaatcccagcactttgggaggcctaggtgggtggatcacctgaggtcaggagttcaagaccagcctggctaacatggtgaaaccccgtctctactaaaaatacaaaaattgaccaggtgtagtggtgggtgcctgtagtcccagctactagggaggctgaagcaggagaatcacttgaacccaggaggcacagcttgcggtgagccgagatcccgccactgcattccagcctgggcaacagagagagactctgtctcaaaaataaaaataaaaaaaaaataataaaagctcattggagcattttggatttgggattcttagatttggggtgctctattggtaagtacaatgcaaatatttcaaaatctgaaaatacccaaaattcaaacacttctgctccctgacatcctgtgtaaacaacactgcagtgaacatttataggtaattcattcagcgggtaagggtcaggaccttttatagggatccttaataccacatttttacatggttcattgagcattcgtgctcccctctgctgtgggtgagggtgcaggtccctcagccttcttgcttgggttgagtcatcctggtctttaatttggtaagcaaaaaatggcatcttgtttttgagctcgtttctgagaaagtgcatgctccttttccccatcaacaactttcatccggcgcctcggaacctcttcagtagagagtgagatgcaaatagcgaggcacagcttctttccctcttctgagctgatgcctggtgaggtcatagactgggtttcattgcaaagacgaaagcgtgggcaggacttttggagcacaaaaaggggcatttcagagtagtcttcatgggcggccactccagaggtgaagttttctagagaaagacatgaaagtactgtgtggctgtggcgacagacagaggcttacgagcctgccctctagagactgtgagctccgcgtgtgagggcaaggcctggggctgtctgggtcgcttctgggtccccaccacagctagcatagggtaggggtggagggggggtgctcaggaagtgatttttgaagagtggatgactgaatacatgcacacacatacttttaagtttctgggttaaagaggaaaacagaatgaggtaaacaaaggaaagtaatgtggaggtgaactgagcagatggcaagatgccgtgaatggttagaggccaggagagccagaatcagagtggcttccgtgaagtgtccctacctcctcccccagcccagctatgtcactcctctgagcttcacacctatggactgttctgcaccctagccctcagatgcaacggtgaaagtgggactcctattgggtttccctgttgaggacagacatggtgccctgtgtatctgctgctgcttttttctttttttcttgctgagtattccatgtgtagcatgtttgtaacacttgataagaaacagaaccatcccagatagcttgaacacttttcaattcagtcagtaacagaccaggtctgctttggatttccaggagcttgtgtcactttattttttttctgagccagggtctcgctttgtcacccagctggagtgcagtggtgcaatgtcagctcaccacagcctctgcctcctgggttcaagcaattctcgtacctcagcctcccaagtagctgggactacaggtgcctgccacaacacccggctcatttttgtgtttttagcagagacggggtttcaccatgttggccaggctggtctcaaactcctgacctcagttgatctgcttgccttggcctctcaaagtgctgggattacaggcgtgagccactgcacccggcctctggattgcccggcctgtgtcactttgtcatgagcccttctcccctagttatcctttattcttcaaacaggcttcctgtgtgacatattttttgagtgcctgctatggggcaagccctgtgccaggtgttcagtatagagtagtgacatcgcctttgccccacagagcataaaaatctaatggaggagacaagccagtccttgtgctagttcatttccacaggtgaatataaaaccacaaactgggcagggcatggtggctcacgcctgtaatcccagcactttcagaggacaaggcaggtggacaacttgagctcaggagtttgagaccagcctgggcaacatggtgagacctcgtctctacaaaaaataaaaaatgaaccaccaggcatggtggtgcatgcctgtagtcccagctatttgggaggctgaggcaggaggatcacttgagttcaggaggtccaggcagcaatgagctgagattgtgctgctcattccagcctgggtgacagactgaggccatgtctcaaaaaaaaaaaagaaaaaaataatcacaaactgtgagtaaggtatctaagggaaaaaactgtgctgggagtgaatgtcaggagacagggagatctgaggcagtatcgtgtccagagcccacagctgaattaatggtaatgcaggtaaatgagctactgtgtgacacaggttaccacagcaagtgtatcggcttttctagggcgagtgtgagctgggtttctggactttgcttaagagcagtgacagacctggaagatactgccccaggcactcttgggtgctttacatgtattggttcatttaatctttaaaccccacaagtgcccttgggattcccattttgcagaggaggctcagggtccttgtcacttgcccaaggtcacagtaagtggaagaatagggagtctagagctgtgctcttcgctgctgccctccagttggaaagctgtccaggccagggacaggctttgcagagagaaggtacagaggacgggacaggcaaatattcagagactatgaggactgaggtggttctgccaactgtggagggcctggtcacttgacaaggcacctcattgcacccccctgaggctctctcaaagccccttttcgagttaggacattgttatctcctgtgtagtttttgttgattgccctctgaaatgctgtgagagggtagaccatccattctgccctcgcctgcccagcccagcacctggcacagtcattgctcagtgtatatttattgaatgaacaattgactgaatgtcaggcccagggctttgccttaggaaacaggctgttggataagaggtagtactaccatactttgcaatttttctggaaatttatgtcacctgggagtggagcagattaccaggctgtttccagagatagcgactctccataaagtgagccaacctgggggctgggcgcagtggctcacgcctgtaaccccagcgctttgggaggctgaggcaggcggatcacgaggtcaggaatttgagaccagcctgaccaacatggtgaaaccccatctctactaaaaaatatgtatataaatgagccgggcgtagtggtgcgtgcctgtaatcccagctactcaggaggctgaggcagtagaatcgcttgcacctgggaggcggaggttgcagtgagcaaagatcgcgccactgcactccagcctgggtgacagagcgagactctgtcttaaaacgaacaaacaaaaaaaacaaaagtgagccaaccctggggaggagtctacgttcagctgcagggagccagggaattggggccgaggtgtctggcacagaaaagctttgggcctgtctcaggtaaatgaagttttgatatagattcaactcccctgccccccacaattgaactgtttttgggggccagcaattaggggctaatttgtgacagtgactttattttcttcctactaaagtactggtttattcggtggccttggtgattagatttaggcataatagttaaatgtaatagaagtttatgtaacaaacagtgattaataatgttgctgtccagattcccgttatagcgctaacctgatgttatgaactgagattaaatttgaatttgagtgcttacattattttgtaaaggtggttgtatattcacatatccacagttttttctataaataacgtgaaaccgtgcttggtttctcttttccaaagtttgccttttccattacatgggcaagtcctgaacctaagccgagacactagtccatcatctccagcaatgaatgtcatccccccagacttcagcatcctgagttaattaaaaggtgcagatgaagttaatcaagtttggaactctaattttgtgcagtgttttgatacgatttgatgagtcatcttttggtagagcacctctctatccctgacagtgtttgatcttaacggaacagttttataatgtgtaaactggtgggaggtgctcttcagaaatgcagtcaacagtggtatgtgtgcgtgtttggctcttggggcggggcggaaagcagaacaaaggagaatttaataagcgagaacttgtcaggggctagggtcagttctgaggctgctgcctgtcaagaacatggctttcttcctgcccccctccactgctgctaactggagtctgaccttcgagaaagagtgaaaaaagacagcttctgtttgttttgctgcaagtaagtggctggactgattggcccccttcccagaggccctgcaaggacttcagatgtggtcagcgaggtatgtggatggtgccagcctgccggccctcgtccagccaaactgcaccaggaacaggcaagggtcccagagaaacagcggggtcagctgctgccgcctttgctcctgctcttaatgctgtcctatttcttcctaagaggaagctggtttactctctcaagattgatgggcaaagttttatatgaccacggtctccacttctcacccactgaacttacagcttgaaattaacagaggcgaggcccatctggaaaaatgcatttgacaaaaacttgatcaaatgggggatcccctgaggtgggtggcaaagaaccagaccacttggaatcctaggtgctgtgtccctgtatggacctgctgtttcttttggattccattagggttaagaagcacaaattctgaagctagatttgagtttacatttctgctccagtacttgggagttacagtgaccaagtcatttaatgtttctgaacttcagtttcctgatctgtaaagtaggatgggtaggttgggcgtagtgggtcatgcctataatcccagcactttgggaggctgaggcaggaggatcacttaaggtcagaagttcgagaccagcctggccaacatagtgaagccccgtcactagtaaaaatacaaaagttatttgggcgtggttgtgggcgtctccagcctgggtgacagagtgagactccatctcaaaaaaaaagaagaaaaacaaaaacaagtaaataaatgaataaaaataaaggaatccagccatctgttagtatagccaaagcagaggatattgcatcaaatgttaaacgctagtcctgtcagtcactcctgagagaacagggcaacaagacccagaaagggtatcaacactgcctgagcagatggaggcaaagctgtgcatgggctgcttatagggcacagtctgaggccttgcagcagtcacgtggaaactgaggctgcctgctttccaggtgcaaggtgatggacagtggcaggaaccctgtgctagatgactcttgtgcgatcttatttctttgttactgggacacaagcaccaactgtcacaagggaccaacaagaggaggtgattttttttttcagctgttaccacaaagcttttcatcttttggtttgaaaacatagctgtgggaataggccgggcgcggtggctcacacctgtaatcccagcactttgggaggccaaggcgggccgatcacaaggtcaggagatcgagaccatcctggctaacacggtgaaaccccgtctatactaaaaatacaaaaattagccgggcgtggtgatggccgcctgtagtcccagctactcgggaggctgaggcaggagaatggcgtgaacccgggaggcggagcttgcagtgagccgagatcgcgccaccgcactccagcctgggcaacagagcgagactctgtctcaaaaaaaaaaaaagaaaaaagagagagaaagaaaatatagctttgggagcaccaaagcccaaagcgttatagtgcctactatgtgtcaggcactatactaaacatttcacatggcttagcactcatgtgatcttcacgataacctggtgagcgggtaattattatcacccttcctactggtttgttgttgttgttgttgtcgtcgttgttgttttgagacagagtctcgctctgtcacccaggctagattgcagtggcacgataccggctcactgcaacctctgcctcctgggtttgagcgactcctgcctcaggctcccgagtagctgggattaaaagcgtccgccaccatgcccagctaatttttgtatttttaatagagatggggttttatcatcttggccaggctggtcttgaacccctgacctcgtgatccacccgccttggcctcccaaagtgctgggattacaggcatcagccaccatgcccggctacttaatttattttttgagacagcctctctctgtagcccagactggagtgcagcggtgtgatttcggctcaccgcaacctctgaatcctgggttcaagcaattctactgcctcagcctcccaagtacttgattataggcacccaccacactttcggctaattttcctatttttagtagagatggggtttcaccatgttggccaggctggtctcaaactcctgacctcaagtgatctgcccaccttagcctcccaaagtgctggggttacaggtgtgagccactgcacctggcctcctttattttatgggacattttttgaaaagaggcttggtccaaacaggcagtacttgccacttctgcagtcatttctctaccctgccccaaaatggttactcagttgcatttatttactacaatcggaataccagcaggacatctacaaaagtagaagtattgggtggtagcagatcagtgctctctggcatccagatcgtctagatggtcacagcctttttttttttttttttggagacagagtcttgctctgtcgcccaggctggagtgcagtggcacaatctcggctcactgcaacctccacctcccgggttcaagagattctcctgcctcagcctcccgagtagctgagattacaggcacccaccaccatgcacggctaatttttttggtatttttagtagagatggggtttcgctgtgttggccaggctggtcttgaactcctgacctcaggtgatccacctgcctcagcctctgaaagtgctgggattacaggcatgagccaccacacctggccaattgttacagctttgagttgactgccaagtgttgaggtagcattgagggttgcagaagctgtgttcttgaaaaagagaagagagtaacattctcagaaagcaaacagtattcagaagagtcaatgggtgttctggagcttttttcttttctttcctttttttttttaaagaaattaccagctgggtgctgtggctcacgcctgtaattccagcactttggggggccaaggtgggaggatcacctgaggtcaggaacttgagaccaggaatttttctatttttagtgaaaccccatctctactaaaaatacaaaaaattagctgggtgtggctgcaggcacctgtaatccccagttacttggcaggttgaggcaggagaatggcttgaacccgggaggtggaggttgcattgagccgagatcacgccattgcactccagcctgggcaacagagcaagattgtctcaaaaaaaaaaaaaaagaaagaaaagaaaaagaaaaagaaattacctcttctctgatatgcagagccccgtctatactggacaggtggaagttaccagagaaatacaggccaggggcctttgtctgacattggcactgagaaaagcatagcccagaagcagggtgtgtcttttttttttacctgggcatctgtggtttgagatcttcttggaacactttataacccatttctgaacgtctcccaggcttcagtggagccacctgttgtagcttctaaaactgtgtcctcctcagttgttctcccacccattgccttcacagatgcagagaccaagattcactcactcgccattggacctttagcacccaggtctgtctggcacaaagtaagtgccaggctggtggagtgaatgaattctacttagagaatggccctcaacacaggctgctcattaccaaaactatttggtctttaaaaagtgtgactctgatgcttcagtctggggtgggtaccaaatacttgtattttttaaagagcctcacagcaacttgaatttaccttaatttttatgtaggaacccttgtcctggtagagagtataatttgctgaataagtctactttttcaatcaacatatacggaagagatatcaatgaaagaactgacaaactgtaaagccccctctccaggtgtaaagcactcagggcttgggcctagaagctgatccatgtctctgtgtctgttctgaaatagcctgtgtgatgtgggagaaagagtattgtccttagagacaaggctcgagactggctgtgccctttccttgggcagtatgtagggaacaagaatgcctgcccgcccgcaggcaggttacctgtggacaaggtgtagtgggcagttagaaggtgttggtatgttaatcagtcttttttttttttttttttttgagatggagttacgctctatcgcacaggcaaagtgcagtggcgcgatctcagctcactgcaacctcccaggttcaagtgattcttctgcttcagcctcccaagtacctgggactacaggcgtgcgccaccacgcctggctaatttatgtatttttttagtagagacggggtttcaccatgttggccaggctggtctctaacttctgacctcgtgatctgcctgcctcggcctcccaaagtgctgggattacagacgttacagacgtgagccaccacacctggccagtctttttttttttttttctgagatgaagtctcactctgttgcccaggctggagttcagtggcacgatctcggctcactgcaacctctgcctcccgggttcaagcgattctcctgcctcagcctcctgactaagtgggactacaggtgcctgccaccacgcctggctaatttttgtatttttagtagagaccgggtttcaccatgttggccaggttggtctcgaactcctgacctcagatgatccacccgccttggcctcccaaaatgcttggattacaggcgtgagccactgcacccagcctaattagtcttttgctcctatttgtctttatttgggataaaagttatagccttgttggggtcttcttacacagtagttctgactcacagccatcatctgaacctttcctctggttcacaaccaaaattaaacatccatttatggggattgagatagttttcatagtaaaggaagttttgtttgtaatgaccttcctgtttgatgggtctaagtatatggctggcccttctggctaaagcaggctttaaactggtcctgcctagaatgtgtacctcccactccttatcatctctcttctaggtcccttcccctttccctttcccttccccttccccttcgcttcttccttccctttgttccttttcctttcctttttttcttctttttttttttttttttttgacagggtctcactctgtcacccaggctggagtgcagtgatgagatctctgctcatgtagccttgaccttctgggctcaagtgatcttctgccttggcctccttagtagctgggactacaggcaccaccatacttggctaaattttttttttttttttggtagcagtgaggtctcactatgttgcccaggattatctcaaactcctgggctcaagcgatcctcacgccttggccccccaaagtgttgggattgcagatgtgtgccatcacactctgcctcttccgggtctttttttttttttttttcccagacggagtctcgctctgttgcccaggctggagtgcagtggcacgatcttggctcactgcaacctctgcctcctgggttcaagcgattctcctgcctcagccttccgagtagctgggattataggtgcctggctaattttttttatatttttagtagagacggggtttcaccatgttggtcaggctggtctcaaactcctgacctcgtgatcctcccacctcggcctcccaaagtgctgggattacaggcgtgagccaccgcgcctggcttttttttttttttttttttttttttttttttttaattttacttttttgagacggagtctcactctgtcacccaggctagattgcagtggcacaatcttggttcactgcaacttccgcctgctggattcaagtgattctcctgcttcagtctcccaagtagctgggactacaggcacgtgtcaccacacctggctaatttttgtatttttagtagagacagggtttcactatgttggccaggctggtctcgaactcctgaccttgtgatccacctgcctcggcctcccaaagtgctggggttacagctgtgagccaccgcacccggctcttccaggtcttaatagagcctttttcctctactgaaagcttccactgctttctgcccccttcaaactcatatatacttcattgaattgtttcctcggggaagccttcctgataccaccctacagagggtgtcagacgccctattatgctgtcacagcacttttcacagtaaggtaaattgcttttataattattggattgcctctctgactatgtttgttgaataaataaaaaaaggtggccaggtgccgtggctcacacctgtaatcccagcactttgggaggccgaggcgggcggatcacgaggtcaggagtttgagacaagcctgaccaacatggtgaaaacccgtctctactaaatatacaaaaattagccaggcatggtggttcgtgcctgtagtcctagctactcaggaggctgaggcagaagaatcacttgaacccgggaggcagaggttgcagtgagccaagattgtgccattgcactccagcctgggcgacagtgtgagcctccatctccaaaaaaaaaaaaaagtggctttataacctgccttctttttcttattcccagtgctcttaaagttccgtacagataaaggaagagatcccagttctgatacatatgaggaagattctgagttgttgctccagatacgaaatgatgtgcttgactcactgggtattagtcctgacctgcttcctgaggactttgtcaggttggtgtcagtatttatcactgtttagtctggacagataaagtttgttttcaggatttgccttaatttgacaagctcttttattagaaacccttcagagagcaccctgccacattctgctcgctcctgtagacttctgcctctccactagaatagcaatatataaaaaataaagaggggacagattctgatttttacaataagtatcttatattcacgtggttcaaaattcaaggcaatgtaagatctgtaaacattattctctaccttttttcactttatgtgatcttgttatctcttggggacatctccagatcagtacatagtttgctccctcttttccacagctccttagtattctagagtgtgaagcgatggagtttattgaaccagttgcctgctcactcaagttgtgttcaggcttttctaactgcgtaacactgcagtgtgtgaccttgtgtcgtacgtgtgcaggtacaactgcaggataattaggaggaagggagttgctgggtcagaaggttgtaatttatcatttggtcagcattgccaccttgcctccattggtatcctatcaattcatacccccagcagcaaaaccacccatgttcccagcatcctctcacttggacactccatgctttcaccttacgtgactacctttttgctctcataaacaggcttaggatttgattggagaagaccacatagtgactaggtcacaatctctctctctcttttttttttttgagacagagttttgctcttgttgcccaggctggagtgcaatggcacaatctcaactcaccgcaacttctgccgcctgggtccaagcgattctcctaactcagccttttgagtagctgggattacaggtgcctgccaccacgcccagctaattttttttgtatttttagtagagatggggttttccatgttggccaggcaggtcttgaactcttgacctcaggtgatccgcctaccttggcctcccaaagtgctgagattacaggcatgagccaccacgcgctccatccacatctccttccaagcagctctgggatcatgtacacaccctaattccctttccatgtcttgagaggcttcctaaactcggctttgcagtgcctccagcttgtagcagtgataatgatggctgcagtttactgagcagctgttatgtactaggcatcaggtagtaagtagccaacccagatcccaccccaggtatcattacagtgcttgctctagtagcagcatgctaccttggtttcttatcaacagtaaggtctgccagagtccctagtcctttctttgttgacttcctgctgggaacttcaggtgagcaacagcaaaccccactccatttagggccagcagtggtctttgaagcacctgtggtgccctgacccaaaaagccatgattgtcctggtacagtggctcacacctataatcccagcactttgggaggttgaggcaggcagattgctttgagcttaggagtttgaggccaaccttgacaacatggtgaaaccctgtctctacaaaaaatagaaaaattaactgggcatcgatgactggtgcttgtagtctcagctactctggaggctgaggctagagcatcgcttgagcccaggaaagcagaggttgcagtgaaccaagattgcaccactgcattccagcctgggtgacagagagagaccgtgtctcaatacatatagcgtaaggctgggcgcggtggctcacgcctgtaatcccagcactttgggaggccgagacaggcagatcatgaggtcaggagattgagaccatcgtggctaacatggtgaaaccccatctctactaaaaatacaaaaaattagccaggtgtggtggtgggtgcctaagtcccagctactcgggaggctgaggcaggagaatggcgtgaacccgggaggcagaggttgcagtgagctgagatcacgccactgcactccagcctgggcgacagagcgagagggagactccttctcaaaaaaaaaaaaaaaaaaaaaaaggcagcaatagagtggcagtgcctgagcacacgagactgagacatggaaaagcggtttccccaaagagggtgggcagggaaggaaccactttggagagaaaaccagccagcagctcgttaggctgtggctttcctcttctaggaagcagggccttcaactctgctggccggtgatgcagagccagaccgttcatcactttgaatgcccaagtagtcacttggctgcacactcacggcccagcacacagccccaggtatgctcagtggctgccgcttgccactggctgactggctgggattattggaactgaagccctgcatgacccagtccttcttcctgctgcgaagcacagcagaggaaacacttgcttctcacaaactggtcattcctccaccaagagatgagtgccccagtgagttaccatgagatccaagcctgtacagtgtcatcagccgctgacctcacggtgctgatgttacaaaggcaccttgtaaactgctgcctatgtttagatgatggctttttttttttttggagacagagtctcgctctgtcccccaggctggagtgcgatggcatgatcttggctcactgcaagttccgcctcccgggttcacgccattctcctgcctcagcctccccagtagctgggataacaggcgcccgccaccacgcccagctaattttttttgtattttttagtagagatgtggtttcgctgtgttagccaggatggtcttgatctcctgacctcatgatccacctgcctcggcctcccaaagtgttgggattacaagtgtgagccaccacgcccagcctctttttttttttttttttaagatagggtctctctctgttgcctaggctagagtgcagtggcacatcatagctcactgcagcatcaacctcctgggctcaggcaacactctcatctcggcctcttgcgtagctgggactataggcgtgtactaccaagcctgcctaattttttttttttttttttttttttgtattgacagggtctcactatgttcaccaggctgtttcctattttttaaagttatgaaccgcataacaagagagtatacaaagcacatctgcctgagttaaatgataattaatacttatttatttttgttgtagagacgggggtctcactctgctgcccaggctgttctcagactcctggattcaagccatccttctgccttggctttccaaaacttctgggatagacaggcgtcagccacttgtatctcttttaatttggaatagcccttggcaaactggcttgccacctctttttgtaaataaagttttattggcacacttactcatttatatattatctgtggcagcttttgtgccacagcagggttaaatagttataacaaagaccatatggcccataaagctgaaaatattttattatctggttcttttgtttgtttgtttgtttttgagacaaagtttcactttgtcacctaggctagagtgcagtggcatgatctcggctcactgcaacctccacctcccgggttcaagtgaatctcctgcctcagcctcctgagtagctgggattacgggcatacgccaccatgcccagctatttttttttatttttttattttttttatttttttttgagatggagtcttactctgtcacccaagctagagtgcaatggcccgatcttggctcactgcaacctccgcctctgtgctctgtggttcaagtgattcttctgtctcaacctcctgagtagctgggactacaggcgcgtgccaccacgcccggctaatttttgtatttttagtagagatggggtttcaccatattggccagactgatctcaaactcctgacctcatgatccacccagcttggcctccgaaagtgctgggattacaggcatgagccactgcacctggcctgttatctggttcctttttttttttttttttttttttttttttgaatcagagtcttgctgtgtcacccaggctggagtgcagtggcgtgatctcggcttattgcaacctctgcctcccagctttaagtgattcttttgcctcagcctctggagtagctgggactataggcacgtgccaccacgcccagctaatttctgtatttttagtagagacggggtttcaccatattggccagactgaactattcctccaatacggccaaaatgagattctaccagcaatgggaggagtttttttaattattattattgggagtctctctctcacccaggctggagtgcagtggcaccatctcggctcactgcaacctccacctcctgggttcatgcaattcttccacctcagcctcccgagtatctggcattacagctgcccgccaccacacccggctaacttttgtattttagtagagacggggtttcactatgtaggtcaagctggtcttgaactcctgacctcaaatgatccacccgccttggcctcccaaagtgctgggattacagatgtgagccaccgcacccagccctagttctccatgtattttagagctctgtagtggaccttgataagcaggaagatgttacccctggatgaacaaaatgggaatgtgctggtcctggccagggcgtaaggagccggaggtgcctttggacacagctcttgggattggaatggatacagccttttgggagggcattttggcaatacatatgaaaaactagcattgctatatttagaaatttgtcttaaggaattatttcgacgcctgtgtctttgtcaagatgtatgattacagtgttgaacagcttaaatgtccctcaataggttatagaacagaagagtaatagttgataatatttgggtttaaaattatacctatttatttatttatttattttttgagacagtcttgccctgtcaccaggctggagtgtagttgtgcgatctcagctcactgcaacctatgcctcccaggttcaagcgattctcctgcctcaacctcctgagtagctgggactacaggctcaccccaccacaccaagctaatttttgtatttttagtagaaacggggtttcaccatgtgggccaggatgatctcgatctcttgactttgtgatccgcccacctcgacctcccaaagtgctgggattacaggcatcagccactgagcccgccctaattatacccgtttagattgtgcacttttaaaaatgtctagaaggggctgggcgcagtggctcacacctgtaatcccagcgctttgggaggccgaggcgggcggatcacgaggtcaagagattgagaccatcctggccaacatggtgaaaccccgtctctactaaaaattcagagtagccgggcgtggtggcgggtgcctgtagtctcagctactcaggaggctgaggcaggaaaatgacatgaatccgggaggcggagcttgcagtaagccaagatcgcgccactgcactccagcctgggtgacagagcgagactccgtctcaaaaaaagtctagaaggatgtgcaccacactggggagattggaggtagttctgtagggaggctttccctttcacttgtctgtgttccagtttgcttggtgagcacacagcattgtgttcaggagtaggagctggcagagcacacttcctttggggaagtggtggaattaagtgatttgcttactaggatgggtaacttggaggggcaggtgactgtgtcatctaaaatttgtcctctagatgccccatcctggcccagaagggctggtttctatgtgggttgtgaagactttttctgccctcatactttaatttcacgcctcaaatttcccttgcttcctacatgttaacacaggcctgctccctgacatttgtctgggaatagcatatagaacccactggccattatgggtaagaagagaattgcgagaatgtgaccagggcactgaaacatctgatatctctaggacagatataggaagcacagatatagtctttcctttaacttataaaggtaaaaataaaagtattgtgaaagaatttctgcttgccaaagttcaaaggtcttttccaaccacttatgaatcccttgctcagatttcattttcacgcctagatgccagcattaacactgctatctgaatcgggccctcctgctagaagttgtttttattcaggagagcctactactgaatttctccagatgtcatggtcacagttctgttcccagtgctccattttccttgtcttcctctcttttaggtactgcttctccgagatggccccagtgtgtgcggtggttggagggattttggcacaggaaattgtgaaggtaaaacatcactgtggagcagaaaattgttaaccatgactttgtatatgtgctgacagagagaatggaaactgtcttagacagctgcctgctttctctcaccccattcatctttgtttcatgccctccccatttccacctcatcccattttctctggcccatccaggtgccattcagcaaatgaccttggagtgcctgctctgtgcttagctcacagttggccatagtgcctcgaaggtgtgatctgctctcccctaactgtattagttatccagtgcctgttgtattggtcagggattctgcttctcatagctctataagtgagtactatcatgatccccacttaagaggaagacacttgggcccatgaaagggactccagaacctgtgctcttaacctctgtacagtttatctctattcatcaccatgacatcaaagccctcccttttttttttttttttttttttttttttgagatggagtctcgctctgtcccccaggctggagtgcagtagcacgatctcagatcactgcaagctccacctcccgggttcacgccattctcctaccttagccttccaagtagctgggactacaggcgcctgccaccacgcccagctaatttttttgtatttttagtagagacagggtttcactgtgttagccaggatggtctggatctcctgacatcgtgatctgcccacctcagcctctcaaagtgctgggattacaggcatgagccactgtacccagccgcaccccccccctttttttttttttttgagacagaatctcactttgtctctcagactggagtgcagtggcatgatcttgactcactgcaacctccgcctcctgggttcaagcgattctcctgcctcagcctcccgagcagctgagagtacaggttcccaccaccacaccaggctaatttttgtatttttagtagttcaccatattggccaggctggtctcgaactcctgaccttgtgatcctcccacctcagcctcccaaagtgctgggattataggtgtgagccaccgcacccggccaagcccccgtctttttaaccacacactgtaggtatttgtagagaaatcagtttctgtgtccccatgaacacaccaggagcccctcaaggctctgtacaggatgacccgtgaccctgttaggtaggtgttagtgtgtctctcagaagggaagcatcttatacagggtcacataaccagtaactagcacagccttttgagggtcttctggaacatttgggttgctaaaactataccatacccccaaatatattgtacattctttgcagactttgctatttgcccgaagatgttaaatttgccttttgcaggttcttggctgccttcgtggactccggtgaggctttttccttctttcttatggagcagagtcgtgcctggttaaatgattggccatgtccatgtacatgtcaagtttgagcttgggaggacagtttggaggccagcccttaacactttgtcttggggtctgtacattctggaggcgtttggctcaatttgttagtcacaccgttttcctaaggctactttttttttttttttttgtctattttttctgatccttctctctggtctaaattcttcctttgatcaaatctaactttcttctatgtaatgggcaccgaggagatatttggagggggaagaaaagtgtgcaatggccatacctctttccttgctcacattttatacatagcccagagtgatgtgaaaattacagtttatatgcccaatctgagaagagggtaatggccacccagaggactgttcgagcaggattctgaggctccctgtagacaaactgcaggaaagagtgcagcaatgggaatgttctaagtggggaatgggaatgtacatatttttgtagcctaaaatgacgacaccaccaataatagacaagacttactgaaagcccactgtctgccacacaaagacagtgttttttacgtggatactcatttcatctcccaccggccctatgaggtaggaactcctgtgatccctggtttataaaagagagactaaggtgcaggaaagaagatgcttgcccaggctagtgagtgtggtgccaggatgtgggcccaggcagtctggtttctgagcctgtcctcttcaccacggggcagtcatgcatcaggtgttgccttcaatggcaccatcatgtagagactgcatggaccccagggccgctgcccttgcattgtcagccttacttctgcacatcccattgaggggctccccctaaatttttcatgtgggatggagactggaggttggggcaggtagccttgaccccattgttggtggtagtttctcacatccccatcctcacacagccccctccttcctgcctgctggagacagctggtgcccagcatcttgtttctgtttatcccagatagccagagtactctgcattcttcgttgctgggtgtgtttggaatctcctcctaccccatcttgcttgggaagcactttaccttttgccccatgtcaccccatgccctgctctcatccccagtactccttcatacttattactggtcagccttcagccagctggcaggcggggcctgcagtccaagggcctcagactcacctttctctcctgaggcactgtctgagcgcctatggaaagcttacactaggagatgggtcaagcgcaagtctgctcctttggaatcatcttttgcgtctttcctttcttacgtccttctagataccctattttatatccatgtctacttccttgggtttaaagcagttttcctttctctccatccccaccgtccacggcaggtctccctgtctatggtaagagaggtgatagtgaaagcagcagccatcccaggttcatggtaaaacacataccatctcctgtatcttgggtttgagggtctaagagttccacctgtgtactgttggacccttccacctggctaggttggtggcatccccagtattggtaaaggactcctggccctattattattaatagcagctcctacttactaagaatttactacgtgctcggcactttacaagcctagtcacatttcattctcaccaaaactctagcaggcaggtgctttttatttgcctatttgcccagagaagcaaacttctttctgatccaagctccatgtggacagagacctcagaatccttaatgtctagctgaatacctggcatagagtagatgcttaataaatgttcccttgactgggtgcagtagctcatgcctgtaattccagcactttgggaggattgcttgaacctagaagttcaagactagcttgggcaacatgaggagacctcatctctacaaaagtcccagctactcaagagggtatgggaggatatctggagctggggagacggaggttgcagtaagccgagaatgtgcctcccacctgggtagcagaacaagatcctatctcaaaaaattaaaaacatttacaaataaataaaatttccctggaaaaatggctgactaacactatttgtatatggtagatgtgattgtccctgttttatggatgaggaaaagggtttggtgctgagtttgaagaggagcagttcaggatgtgtagccccaccttcctcatgaatgatgggacggtgctcctgggaaccgttaaaccctgccctggcagcttgcctaggtgatgtcttcctctttaaatggtagcttgtggtgaaatttcaatcctttctgggttaaggacctgtttgaaaatttgtgacaattgtgaaccctttctcagaaagatgtatgtgcatacaagactcagtatgttgtttcgggggctgaccctgcctcaaaagacagggccacgtgctcactctccttcccacccctctctctcgctctctgttgcccaggctggagtacagtggtgccatcacagctcactgcagacttgatttccctggacttaagtgatcctcccacctcagcttcctgaggcactgagactataagcacacgccaccacatccaactaattttttttattttttgtagatatggggttttgccatgttgcccaggctggtctcgaactcctgggctcaagtgattctcccgcctcggcctccctaagtgctgggattacagatgtgagacattaagcccagccctgttcttgtattttaaagtgctctgtctggtaaccccacaagataatcaccattgccattgctaaatagcattgtccaggccctctggatcccagccctgaccccctgtggaagcctagcgactctatgtcctcatggaatagcccccgcttctgcatcagtgtgttccttgattaaatgtgtccccttaggtgataaaggccacagcctaagaactgccacctttctcagttgaatagtcatgaataattatttctgctgtttgcccaatggtggtgcaacacagtgttagtcattgttttagttttaaggtgtttttttgtttgtttgttttttgttttgagacagggtctcactctgttccccaggctggagtatagtggcactattacagctcactgcagcctcaatgtcccaggctcaagcgatcctcccacctcagcctcccgagtagctggcaccttgggcatgcatcaccatacctggctaatttatgtcatttttctttttctctttttttttgagacagagtctcactgtgtcgcccaggctggagtgcggtggcgcaatctcagtttactgcaacctctgcctcctgggttcaagcaattctcctgcctcagcctcccgagtagcatgccaccatactcggctaatttctgtatttttagtagagacaggtttcaccgtgttggccaggctggtctccaactcccaacctcaggtgatccgcccacttcagcctcccagagtgctgggattacaggcgtgagccactgcgccccacctattttagttttcatatagacgggatctcaccatgttgcacagactggtcttgaattcctgggctcaagtgattctcccacctcagcctcccaaagtgctgggattacaggtgtgaatgtgcctggccctggcctgttttacatttttgagatacatagtttaacccaggcaaatacatttcttaatctcatgttaggaaaataaggtaatgtttggagaggttaaataatctccccatggacacacagcttgtaagggacagagcaaggagataggacaatcaaaattgtctccagacattgccaaatagccctttgggagcaaaatcgaccccagttaagaaccactgccctagactgcttttagaatttttttttccctctattcctcttaaagcacttgagctaaaccctcttttcatttttctccccaggccctgtctcagcgggaccctcctcacaacaacttcttcttcttcgatggcatgaaggggaatgggattgtggagtgccttggccccaagtgaactcaagatttggcagccccagagatgccaactgcagcatgcccacctgtattccctgtccccttccttcatgaaggcatctccaggcaaggaaaactgaagtcattggcccgatacaaaacatttcctgcaacgaaggaggtggtgccgacgtgctgcttcccatcaccagcagctgctcgacaaggggcgcagggtggctgtctttgttccagcactgttcaggctgcctgtcatcccgggcctgccagctcccctgagtgatgagcacttccaagcacccctctgccctttctctgtccttatgctgtcccggcctcgccagccctctggggcattgtgggagatgcctgccaggaatgagcaagctctgttgctcgggagcctcttgtcaccttcttggacttattccccacctgataccttatagagaaaagtgtgaattcaggtggagagtaggcccaggccccatgaggcaccagtggaagcacagctccaagttcagacaggtgcccttagagaggaaaaccatgacaggcaaatgcatttcctctggagtttgagaccctgacaaacaacaggtggcatctggtgtgctgttcttgagttttcgtttaggattagttgagttccagctgggttttgggagaaaggagatgctaccaagtcttggatgttagggcgagaccctgcaagttgagtattagagagcttgtctttcaaggcaggttcctggggcttcagggctaggagggaggagcctgcccttttaacagaaccccagtcacatgcggctcaagtcactcagaggctgttgcatttcagggctatgttggtcctttgtttacctcctaaaccacagctgtttgtgtttcacatatgttgtgaattttccttggttctttttaaaggaatgataataaagttacttgctttaggatttgcttgtttttcttccacttcagaagcttctgagagggaatgggatgatcctaccagttgccttttcagacctgaggctctaactcaagagattcctcctctccctcaccattcctgccaccattttttctgggtgatgcagcaagagttaaattgttcacattctagaatgtgtagaagcttctggctccagttgtctaatggataattcagctaaatagtggctattttcagtggcaagaattataataataaagggaagtcaaaagtgatgcttcatatgccccaagtgccacagccgctacgggtcagagcttttattggaagaccaggtttgccttgatgcagccaaagtgcgttccagttcaccccactcttgcttgtgtttcttctttatgtaaattgtgtgatgtttcaataaatcagtctctttcctattctgatcctgcagcagttagtcggggagaaaagtggtcttcactacagaagggcctctgttcctcaaccctgcatcacctgctcccgccggaggtgagacaggggctgcatttcggaaaggatccgtgtctcgccacctttagtgcaagtcagtggcgtcagggtcagcagttacattgctgcatgaatttcacgtggtctttaaattctgagctaattatactcttgactgtaatgtgcagccttggtcacaagggggagcaggtgggtctggattgataaaaacaaaattgtagaatcgtcccggaagcttcaaacttttccaccctgtacctctaacggcagagattaagtcacccagaggacccctcaggaatcgaggggaaagctgccagccccaggcaagaaatgtctagtttctacaaatttcataaactgccacatgatgtttgtattaatcataaaaatgaagaaaaaaaggccaggcgtggtggctcacgcctgtaatcccaacattttgggaggctgaggcggacgaatcacgaggtcaggagtttgagagcagccaggccaacgtggtgaaaccctgtctactaaaattacaaaaattagccgggcatggtggcgggtgcctgtaatctcagctactgggggaggctgagacaggagaatcacttgaacctgggaggcggaggtcgcaatgagctgaggtcgcaccactgcactccagcccgggtaacagtgtgacactccatctcaaaatctgcagtcagtcaggcatggtgggaggctgtggcgggagaagcacttcagcccaagagttcgtgaccaacttgggaaacaaagcaagaccccatctccacaaaaaaagaaatagctgagcatagtggcttgtgcctgtggtcacagctgcttgggagactggggcaggaggatcacttgagcccaggagtttgaggctgaaatgacctggatttcaccactgcactgaagcctgggtgaaagagtgagacactgtctcgaaaaaaaaatcccagcactttgggaggccgaggcgggcggatcgcgaggtcaggagttcaacaccagcctgaccaacatagtgaaaccccgtctctactaaaaaaaaaaaatacaaaaactagctgggcatggtggcgcgtggctgtaatccagctactcaggaggctgaggcaggagaatcgcttgcacctgggaggcggaggttgcagtgagccgagatcgtgccactgcagtccagcctgggcaacagagcgagactccatctcaaaaaaaaaaaaaaaagttatcttgacgtatgttctattagctcattacaggtgtggaagagatggcttaggttgcaggtggtaagtttaatgataacaaccaatggtcattatacccatgcaacctgcctggtacttttcagaatccttgttctttgagttggaatccccacagcaaccccatggggatagatgctgttctcctacccatactggagataaggaaacaggctcacctcacaagcaagggagagatggaaatggcgctgactgggaaagctgcggtgcggggcactcagtagagattcatgtagtggcacggcttgttcgctcagtgagaacaagattttgggcttcccttcacaagtccctgagacccagtagtcactggaaaacatcatgtcggccttcataaaagagggccttcaactaggtccaaaagggtgggtggatttggttcctaagcttgtacgatattcaagcaatatacaagcataaagagaagattcctctccgctgcagggcacagcctgtcagcacaatgttggccacataataagagcagctgacttcacagctaaactgcattttggagagaaatatgagatgctttttggacatgttagctgtatccactttctttttttctttttcttttttcttttttttttttttaatagacggagtcttgctctgtcacccaggctagagtgcagtggtgtgatctcggctcactgcaacctccacctcctggtttcaagcaattctcctgcctcagcctcccaagtagctgggattacaggccccggccaccatgcccagctaatttttgtacttttagtagacagggtttcaccatgttggcctggctgctctcgaactcctgacctgaagtaatccacctgcctcagcacccaaaatgctgggattataggtgtaagccacagcgcccagcctagctttatccactttcatatccactccccggaggtcacccctgttaactgttgagagtgaatccttccagactgccatgttcaaacctagactctaccactcagccatgtgaccctcgctacactactttctgttaccccatccctaaaatgggtagaatagtggcacattcctcagatatgtggggattaaaaaatcagtctttgaatcaatattgctcaatgttagctgctattttacatattcataaataactttttctccaatgtgcttttttctcaatatgtcttggagatccttgtcagtatttcatgcatcaaattccataaccaaaacaggtgaaccattaactattgaatcagtctgctgctgtgtgacattgtgcacacttaggaaagacttcccaaagccaagttccagggttagcaagtataaaaatgcattttaggagttggttcttgttttttattttgttttgttttttgagacagagtcatgctctgttgcacaggctggagtgcagtggcgtgatctcggctcactgcaacctctgcctcccggattcaagcaactcctctgcctcagcctcctgagcagctgggaccacaggcgcccaccaccacgcctggctaatttttctatttttagtagagacggggtttcaccatattggccagtctggtctcgaactcccaacctgatgatctgcccacctcagcctcccaaagtgctgggattacaggcatgagccaccgtgcccagcctgttttgtttttttagtgatagggtcttactctgccacccaggctggagtgcagtggtgtgcaatcatggctcactgaaatcttgattttgagggctcaaagtgagtctcccacctcagtctcttgagtagctgggaccacaggcaggcaccaccatacctggctaattttttcccccggctaattttttttttcttttctttttcttttttttttttgagttggagtgttgctcatttgcctaggctggagtgtagtggcatgctctcagctcactgcaagctccacctcccgggttcacgccattctcttgccgcagcctcccgagtagctgggactacaggcgcccgccaccacgcccggctaattctttgtatttttagtagagacagggtttcagcatgttagccaggatggtctcgatctcctgacctcgtgatccacccgcctcggcctctcaaagtgctgggattacaggcgtgagctaccacgcccggcctttttttttttttgtatttttagtagagacggagtttcaccatgttccccctggctaatgtttttaaaattattggctgggtgcggtggctcatgcctgtaatcccaacattttgggaggtcgaggtggctggatcacctgaggtcaggagtcaccagaccagcctgaccaacatggtgaaaccccgtctctactgaaaatacaaaaattagctaggtgttgtccacatgcctgtaatcccagctactctgaaggccgaggcaggaaaatcgcttgaacccaggaggtggaggttgcagtgagccgagatcgagcagttgcactccagcctaggcaacaagagcgaaactccatctcaaaaaatatatatacatatttttagtagccatgaggtctcactatgttgcccaggcttaaactctggcctcaagtgatcctcttacctcagcctcctaaagtactgtgattacagatgtaagctactacgtctggctggtacttttctttcttttctttcttttttttttttttgagatgaagtctcactctatcgcccaggctgtagtgcagtggcacaatctcggctgactgcaacctccgcctcccgggatcaagcaattctccaacctcagcctcccaagtagctgggattataggtgcacgccgcccagctaattttttaatttgtaatttttttactttttatttatttattttgagacagagtttcactcttgtcacccaggctggagtgcgatgatgtgatcttggctcactacaacttccacctcctgggttcaagcaattctcctgcctcagcctcctgagtagctgggattacaggtgcccaccaccacacccaactaatttttgtatttttagtagagacagggtttcaccatgttgaccaggctggtcacaaactcctgacctcaagtgatccacccgcctcagcttcccaaagtgctgggattacaggtgtgagccaacactaccggccagaaatttacagatgttaaaggctcagtgaatcccaaacgggataaacatgaagaatatcatgtttagaaaaaacatctaggtggccgggtgcagtggctcatgtctgtaatcccagctgctcaagaggctgaggcaggagaactgcttgaacccaggaggcagaagttgcagtgagaatcatgtcactgcactccagcctgggcgacacagcgagactcagtctcaaaaaaaaaaaaaaaaaaaaaggaggccgggtgtggtggctcacgcctgtaatcccagcattttgggaggccaaggcctgaagttgggagtttgagactagcctgactaacatggagaagccccatcttgactaacatggagaagccctgtctctactaaaaatacaaaattagccgggcaaggtggcacatgcctgtaatcccagctacttgggaggttgaggcaggagaatcacttgaacccaggaggcggaggttgtggtgagccaagatcgtgccactgcactccatcctgggcaaaaagagcgaaattctgtctcaaaaaaaaaaaaaagaacctccatctccatgcttaaatacttgtgagcagggcaaaggccatgcagagagtgttcacacccagaccaacgccctgcttcgccttcactgcagtgcatgccatccctttggtagaggatgagacaccttcccataactggctcccctttctcataatatgtcttagaattattaacatggttgaatttaggtctaccatttgctttccatttgtcccacttttgttcccctgtttctcctttcctgccttctcttgaagtatttgattaatttttttttttttttttttttttgagacagagtctcactctgtcacccaggctagagtgcagtagcgcgatctcggctcactgcaacctccacctcccagcaagtagctgaggttataggctcccaccaccatgccagcgaatttttatatttttggtagagacaaagtttcaccatgttgatcaggctggtcttgaactcctgaccttaagtgatccacccacctcagcctcccaaagtgctgggattacaggcgggagccacctcactcagctaaatgttctaataaatacccatgtacccactattttgccacttgcagtttttattcatcattatctgtcatttttcttcatgttggtaaagctctagttcattcccgctaatggatgtatactattctgttgtgtgattacatcggacaaaaaaagttttttgttttttttttgagacagagtcttgctctgttgcccaagctggagtgcagtggcgtggtcttggctcactgcaacctccacctcccgggttcaagcaattctcctgctttaccctcccaagtagctggggttacaggtgcccactaccacaccggccaattgttgtatttatttattatttatttattttttattctttttgcgtctcactctgtcgcccaggctggagcgcagtggcacaatctcagctcactgtaagctccacctcccgggttcacaccattctcttgcctcagcctcccaagtagctgggactacaggtgcccgccaccacccccaggtaattttttgtatttttaatggagatggggtttcaccatgttagccaggacggtctcaatctcctgacctcgtgatccgcctgcctcggcctcccaaagtgctggaattacaggcgggagccaccacacctggccctatttatttttaagacggaattttgctcttgttgcccaggctggagtgcaatggcatgatctcggctcactgcagactctgcctcctgggttcaagcgattctcctgcctcagcctcccgagtagctaggattacaggtgcttgccaccactcctgggtaatttttgtatttttaatagagatggggtttcaccatgttggccaggctggtcttgaactcctgacctcaagtgttccacgtgcctcggtctcccaaagtgctggtattataggcgtgagccactgcgcccggccgatctttcttcttttttttttttttttttttgagatggagtctcgctctgtcacccaggctggagtgctatggcacggtctcggctcactgcaacctccacctcctgggttccagcgattctcctccctaagcctcccaagtagctgggattacaggtgcctgccactatgcctggttaatttttgtatttttagtagagctggggtttcaccgtgttggtcaggctggtctcgaactgctgacctcatgatccgcctgccttggcctcccaaagtactgggattacaggcatgagccactgcgcctggctgcccggccgtatttttattgttttttttgtttttgtttttttgttttttttgagacggagtctcactctgtagcccaggctggagtgcagtagcacaatctctgctcactacaacctccacctgccgggttcaagcgattctcctgcctcagcctcctgagtagctgggactacaggcgcatgccaccacgcctggctaatttttgtatttttagtagagatggggtttcactatgttggccaggctggtctcaaactcctgacctcgggctcccaaaattttgggattacaggtgtgagccacctggcctggccaccacatgggactatttaccctaccaactgctgttggatacttagatggttttgtgcattgccagtacttggatacttgtatgcacccgtgttcctctaagggggacgcccacaaaagctattgctgccacaaggtatgtgcattctcatcttgacaccatgtcttagtctgttttgtcttgctgtaacggaattgcacagactaggaaacgtgtaatgaacagaaatctgtctgggcgcgctggctcacacctgtaatcccagccttttgagaggccaaggcaggtggatcacttgagatcagtagttcaagaccagcctggccaacatggtgaaaccccatttctacaaaaaattagcccggcatgttggggcatgcttgtaatcccagctactagagaagctgaggcaggagaatcgcttgaacccaggatgcagaggatgcagtgaactgagattgtgccactgcactccagcttgcgagacagagtgagattctgtgggagacagagcgagactccctctcaaaaaaaaaaaaaaaaaaaaaaagagaaatctatgggctcacaaatctgaaggttgaaaagtcccagatggtggggctggtatttggtgagggccttccggcttccttgtaacatagcggaaggcatctcatctgagacagaggggtgaactcattctttataaggaatccattcccgtgaaaactcactcacttccatggtcatggcattagtgcatttctgagagcagagccctggtgacgtaattatctcttaaatgtctcacttctaaaatctgtagcactgcaggttaaatttccaacccaagaactttgggggacacattcgtatcccaacacacggttttatcaaatgcttctccaaagtgattgttgccagttaccacaccctggccatccagatgggccatttcccctagtgtccctttagcagcaaggacagttgggaaagggtggagctgggactgaccctgtgtctgtaaatattatataattatataccctgcttcagagtccccctctgttgccctggagtgcagtggcatgatcatagttcactgtagcttccaactcctgggctcaagctatgatccccctgcctcatcctcctgagtagtgggtactataggcatgtgccaccatgcccagcgaattaaaaaaattatttttgtgtgtgtggagatggagtcttgctatgtttctaggctgttctttttttttttttttgagacggagtctcgctctgtcgcccaggccggactgcggactgcagtggcgcaatctcggctcactgcaagctccgcttcccaggttcacgccattctcctgcctcagcctcccgagtagctgggactacaggcgcccgccaccgcgcccggctaattttttgtatttttagtagagacggggtttcaccttgttagccatgatggtctcgatctcctgacctcatgatccacccgcctcggcctcccaaagtgctgggattacaggtgtgagccaccacacctggcctataccttgcttctttctctttctttccttttttttttttttctggagacagtctccctctgtcgcccaggctggcgtacagtggtgcaatctcggctcacttgcaacctctgcctcccgggttcaagggattctcctgtctcagcctctcgagtagttgggactacaggcttgcatcgccacacctggctaatttttgtatttttagtagagacagggtttcaccatgttggccaagctggtctcgaactcctgatctcaggtgattcgcccaccttggcctcccaaagtgttgggattatgcccttccttccttccttccagacagggtcttgctctgtcacctaggctagaatgcaatggcaggatcttggctcgctgtaacctttatctcctaggttcaagcaattctcctgcttcagcctcttcagtagctgggattacagacactcgctaccacgctcagctaatttttgtatttttagtagagacggggtttcgccatgttggtcaggctcgtctcgatctcctgacctcaggtgatctgcctacctccctgcttctcattgaggtctctgccagtcaggtatcagcacagggaaagggctcaagggcagtgtgtggccatggccctgtttgcagaagatggcagtaggagcaaccctttctacatttactcaacacagccgcttatgaccagcctggttaggcctcagggcagtgtgcggagactcactgtgatcttagctccaggtgctcctccagctggagaggcagcctacggctgatcacagtgcaaggccagatgtccctttctgtctctgtgacggcagaaacgaggtctgtctcatgactctatcccaagcacttgtcacagtggtgcctctgaatatgttacgggtcattcactcatccattaaatatcaagcgcccctacaacacctcatggggacttcactttttattttgtttttgagacagggtctcaccctgtcacccaagcttgagtgcagtggcttgatcatcgctcactgcagcctccaattcctgggctcaagtgatcctcctgcctcagcctcctgagtagctgggactacagacacacaccaccatgcctggctaattttttttatttttttatttttgtagagacggagtttcatcgtgttgcccaggatggtcttgaactcctgggttcaagagatctacccacctcggcctctcaaagtgctgggattacaggcatgagccatggcaccaggccaagcttcacttttaccgggaatggggatgatgaaggctaggagcgtcccggtctggagaagcccaggccccttagcctttcttctgatggagccacaactgccagggcccacctctcccacccactcacaagcagggctcacagagcagagcccccgatcagaagcctctccaaggccaggctgcagggaaggcaagcagaaagagtatccactgttccaatctgattttattgaaaaggaaacatacaaaaatcatgtacaaaaaaaattaaccaaacatgtacagaaaattcattccggtatctacagcagcgcatatacagtatcttacaggctgggccatccctccccactcccagactcctccctcttccgagatttccccccctccctgactccccgtcttccccccagcgcttggccctggggactaaggctggggcggcttcagccaaaatctcccaccccccaaatgaatgccagtggtcacacgtgctctctctaaacctatgcaatgggattgatggggcggggggcggtcacgggcagagcacaggattcacagtctgggcccctcctggccaccccctgatgaaggtgaggcaggcatgcccaccacccgccggctggctcagggaagatggctgggcgccgggctggagcaaccggcaaacgagccccactctctggctccaggaggctagtggtcacgtttggctcatttgctcttcacgggccccctcccaggaggagggggggaagcaccaggggcctgaggccaggcccagagtgaaggagcaccgagaggagagcccccccctcccagtgtcacccctgcagctggaacgggcaccagcacaacagcctttcctgagatggtggtgggcggcagaggcgggcggctcagtccccaccccctcggtcaccgccaccttccgatgctgagtccatcagccgtccctctcctggcttcttggccagggacccaggagtccgcatctccgtcagtgcaccccaggctgggctggggctggagtggctgccccggcccgcccccgggacaggcagggctgggagtccagtatgctacatggtgcagagaaagtcccccgcgctggccagggtgtcaggaggtgggaggggcctgccccccgagtccctgacgtccaccgggcgggtgcaggcacctaattgggctccatctcgggggctctgtggcccctgggtaagggcaggagtcccatgatgagattgtacaggaccctccagggtgaggggcggtgccgctgctgctcctcttgtctctggggaaaagagagagaaggggcagttagcaggggactgagtatggtgatgggagtggggatggtcagctccaggggcagcgaggcgacagtctcgcccaccctattccagctcctccccccgcctgggctaatgtccatgtctcggaggtcacatcctcatccaggacatgagacctggaggcagaggacaaacacggaatgccttcagcagagagctgggcaccaagcgagtgcgtggcacattagctgtgactgccccgtctctgttgtacatttgagaaagacatcccccaaggggctgaaggatggactgcaacctatcctgcccctccctacagggctggcaagatgaggagaaaggagcagggtgcccacagtcttggcagttctagaacaatctgtggaaggaggagaactgggaagagccccccccattgcagaggcttcaacagaagcacctctaggcaacgccgagtgaaacccctgccccctctccagtggcaggatgaaaacaaggtggtctctaggaccctctcagctccaacatcctaggaagtgggcaggcaggaggctaggtcctaggaaaggctcccgactggtaaaaattaaaggcaatactaaaaagagtacagaggcccggcgcagtgacttatagctgtaatcccagcactttgagaggccaaggcgggaggatcacctgaggtcaggagtttgagaccagtgtggccaacatggtagaaccccgtctctattaaaaatacaggccgggcgcggtggctcacgcctgtaatctcagcactttgggaggccgaggtaggcggatcacctgaggtcgggagtttgagaccagcctgacctacatggagaaaccccatctctactaaaaatacaaaattagccggacttggtggcacatgtctgtaatcccagctacttgggaaggctgaggcaggagaatcgcttgaacctgggaagtggaggttgcggtgagccgagatcgtgccattgcactccagcctgggcaagagcaaaactctgtctcaaaaaaaaaaaaaaaaaaaaatacaggccgggtgcggtggctcacgcctgtaatcccagcaccttgggaggccgaggcgggcggattatgaggtcaggagatcgagatcatcctggctaacacagtgaaaccccatctctactaaaaatacaaaaaaattagccgggtgtggtggcgggcgcctgtagtcccagctactccggaggctgaggcaggagaatggcgtgaacccggtaggtggagcttgcagtgagccgagatggcgccactgcactccagcctgggtgacagagcgagactccatctcaaaaaaaaaaaaatggctgggcaaggtggctcacgcctgtaatcccagcactttgggaggccaaggcaggtggatcacctgaggtcaggagttcaagaccagcctggccaccatggggaaaccccgtctctactaaaacaacaaaaattagctgggcctggtggcacacacctgtattcccagctactagggaggccaaggcaggagaatcgcttgaacccgggaggcggaggttgcagtgagccgagattgcaccactgcactccagcctgggcaacagagcaagactccgtgtcaaaaaaaaaattttttttaagtgtacagagagctgcaatcctctgccactccctgtagctccacaggcaggctctgtgctaagtggggaccacctaacctccttcccttcaggtgcaggggaaggagaaactcactttacagaaggttaaatgatcctcatcgtcctcatgctacctggtagtgagtcgcctggtaccagcccagcctcctcaacactccctagcaactcttggggccaggagatggtggcaaagggggcacatcggattggtgtaagttacaaaacccaccactgtcacactgctgtgggtgccacctggtgagaaagctagcaatcacctagtaaggtggatggtgggcagaccacccaggtacctactctagaaacacaagagcgcacccggaaatatgcatgattgggagaggaaaaaaggcaataaataatggccgggcgcagtggcttacacctgtaatcccagcactttgggaggccgaggtgggtggatcacctgaggtcgggaattcaagatcagcctggtcaacatagtgaaaccccgtctctactaaaaatacaaaaattagctgggcatggtggcaggcatctgtaatctcagctacttgggaggctgaggcaggagaatcacttgaacccgggaggtgaaggttgcaatgggccgagattgcaccattgcactccaacctgggcaacaagagcgaaactctgtctcaaaaaataaataaataaaataaaatctgaaatacatttaaaaatagtctgggtgaggtagctcagacccataattccagcaatttgggaggccaaggcaggaggatcacttgaggccaggagtttgagaccagcctgggtaacacagaaagacctgatctctacaaaaaaataaaataaaaattagccaggcatggtggatctgcctgtggtcccagctacttgggaggctgaggcgggaggatcccttaaacccaggagttggaggctgcagggagctgtgattgaaccacggcactccagcctgggagacagtgagaccctgtctctaaacataaaataaaaatacatatctatcctaaatatccatcaatgagaaaatgaataaggatactatgtttatccaacagaatactatgtagcagtgaaaatgactttttttttttttttttttgagacagagtttcattctgtcctccaggctggagtgcagtggcatgatctcctgatctcggctcactgcaacctccacctcctgggttcaagagattctcctgcctcagtctcccaagtagctgggattactggcgtgtgccaccatgctcagctactttttgtttctttttttttttttgagacagattttcgctgttgttgcccaggctggagtgcaatggcacgatctcggctcaccgcaacctctgcctcccggtttcaagcaattatcctgcctcagcctcccgagtagctgagattacaggcatgtgccaccacgcctggctaattttgtatttttagtagagacggggtttgttcatgttggtcaggcttgtctcgaactcccgacctcaggtgatccgccctcctcagcctcccaaagtgctgggattacaggcatgagccaccacgcccggccttaatttttgtatttttagtagagacgaggtttcaccatgttggccagactggtctcaaactcccaacctcaagtgagccacttgcctccgcctcccaaagggctgggattacaggcgtgggccactgcaccaggccgaaaatggctgtatttgttgtttcttttttgagatggtcttgctctgtcccccaggctggagttcagtgacccttcatggctcagtgcagcctcgacttccttggctcaagggaccctttcacctcagcctcccaagtagctgagactacaggcccgcgccaccacacccggctaatttttgtattttttgtagcaacggggatctcattatgtggcccaggctggtctggaactcctgggctcaagcgtccttctatctccgcctcccaaagtgctgggattacaggagtgagccaccgtgcctggctgaacatagatgaatggaagctcttttgcccatatggtgaatctgaagcctaatattgagggaaaaaggaattctggggagaaacaaaaactatgtcatatacgctaagctaagaatgctccatgattctaagccctggttctggcctggtaaatacggagtaaaagcaacacctgcaggggttgagagaggccaactcgagagatttcctttggatgcaaggagggggaagggatggggagagtaaggagcttcaccacatgcgtttctgcggttttgtttggtttcttaataagcaagcaatgcgggtgtaatgttcaaactgaacagagctgcctggtgggcgcatgatgtttgtgatttcccattctctgctgtgggcttcgaatatttgttttaaaaaatcgaggccgtgccaggggctggggggcggggcctcccgcggggcggggctgcgagcccacccctgcggtccccggcccgccccggcgcccgggaaactgtgtggcgctgcgggccgcgcgagagggacggcagggggcgggcgcggcgcggctgctgactcaccggctataaatagcccgggatatatgagccgcgccgcccagcgccgccctcagtccccgcggccgcgggccacgggcgcgcagctccactcctcggcggcctagtccctggccctggccctggccctggctcgggctccggctatgccagccgcggcgcggagtccttgggcggctctgcgggcgcgcgattcccccccacccacttaccccccacctgcctgtccgcggagcgacccagccgcgcagggcagcagctgccgcacatctggcgggggccgcctgccgccccctcctccggcggaagtcccacctgccgtctaccccacccccagcactcacccgccgctcgtactgtgcgttgaggtcgtccgccatccgccgcagctgggccccgatctcccgggcccactgttcctcctccccgcggactcccggggccgcctgggtgggaccgcccgccagagcccccggggcgctgggcacgggcgactccaggtgctgctccgccagcgagagcgagggctgaggaccttggagaggcagaggggcgcggtcagcacccaccacccctccaggcctcgaggtgtctcggcctgctcccctctttcccagccactgctccccgcctcatttctagtgatcccatcgctagtgagtcaatttctcagcttctcctccacaggcaccagaaagcaagaagtacctggggacgccgctctggggtcacctgtctggccagctacgtccccacggcccttgtcagtgtggaaggtagacggccagagaggtgaccccgggggtggtcaggcttaacgacctctattttccaaaggggccacattttgccttttccatgtgacaggcagggaaactgaggcccgcccttagggagtatcccaaggtcacacagggatacagtgactgaccccacccagatcacaagcctcaggtctcctgccctctcgtgtccaaccacagggaagccacacctccggatgtggcagaggcctagagaccagaaggccagagactgtggcagcttcagagcgcgggcctggggggctgggacgcgggagatgccttcctgccccccccccccccccacttctgagcgccctaggaggctcctgccctcccgtcccaccaggtcctggcctgagggttccctaaggcctacagccagggcctcagtttccacatctgtgaccttggccttgaaatcggtgtccccttccagggcttccaggaactgagttagggaagttttctctttcctcgctccccttgggctgccgggacaagatgggggatgggaaaccaggacacactttccctagagcgcctgccggcagggatggggctccacgggcaccacagggttaacagcccatcaggcaggggacctttaacccttccctccccaagactcccccacctccccgaggggacttcccaacacaatggcccctccccctctccttcctccgccgggactgctgaggacagcccctggccaaagagatgcaaataaaagcaaaaggcctctcgacccctccccagaggccagagttgacagtcctcccgctcggcccactctccctgcaacaggaatcctccagggggtctagaggacccagactgggggaggggagctgggatgcagctgttgccccaggcccggaagagacagtgggctgcaattcggggactgcagtcagattccaggagggacttcccacttgacctccccctccacccccagcctccgtcttcctgcttcttgcaacacaaagaccacattggccacaccctcccagtggcccggctgggcccgccacctccccccgtcctctcccacttctccagttcctccgagtctccagccctctctcttcccggctcctatcaccccgggggcggggcgggcactcaccgtccgggcgcgggcctcggggccggctgcggggacccccaggccagcgggaaccccccagggcggcggtgacggcgggtggggcggtgggggcgcagaggtaggcagcgggcagcagggtgggggcggcgggggcggcagccaggccgggctcgcagaggccgcaggacactgccgagggcaccaggcggccgagcgggaaggggcgcgggccgtcgcgggccaggccctctacgggctccggggagctgccctcctggcgtgcgcgggccatggcgctccctggggcctgcgggacacgggaggaggagcaggtcagcagggaagtaccagggcccactgtacctccagcctacccggggttaggacccagatggagaagagtggaggtgtgtgtgcatgcggagggggtgacggccccacagagacacgcccagccgggggatgacaccaccgggtcctggctggcctggagagcctcccgtgcatacggtgatgggcacacaggagggacagggggcacaggacggctctcacagcaaggacagggctcacacaggacggatggaggggtctagcaggtgtgtgtatgagggctgtgacagtcccacaacacaaactcactccacttgggactcacagcatgggctggtggggacaactttcccaacacagcgacgggcacacagggagggcagtgaggcacagcgaggcccccacagcacacacacaaggactcacacgggactggccagcctgaccgcccaccccacctcccacttgcacacaaacactgagatggccccagtctcggacatcactactcagtacacacaatacacacacacccccgaccaaagcaggagcatccagacagaccatcacaagcactctacatactgcgcacactggctggcacaatccatccccacacatccaaactgtcaaagtctcacacactgacccactgttgatatgcccaggggcacatgcaaacacaatgcagcctttgcaaacacaaacacacacacacaagctaggcactgcctcagttcccaaacatgcccctctccacacacacacactcactccagagataagacctgcacacctctggactcacatatcaacacaaaacagacacccacggacacacatacatcaacacccccaaaacacacccacatgtcaccaactctcaggacacacgtagatcaggcacacacagacacatgccatcagacctcaacacaccaccagacaccaacccaccctcctcacgcaaccctcaaacatcatcaccaactgtcagcaacacacacacacacacaccctacagctaactctaatcccacacagcccagcagcacacacacctagcgcacccacagaaaacactggtctcacgtgactgacataaacactacacacacgcagcccacatgacacacatgagccagccgatcacagtgacaagcccctcagacccaacacacacacacacacacaggctcagacacaaccccatccagaggctgccagcaacacccaccgtctacactgcatagaccccacagatcctgggtcctcaaatcccagacgctgatgccagacacacaagccaaacccagactgaaacaaccccccaccacacacatacatacacacacacactcacacctgacaactcacacagacacctggacagaaaacagacatttgcatttagcaggcgcagcatcacaaacgctgggcaaaagacacatgccccggagatacagagacggcctcagccaagacagaaacacacaggcaagacacaagcacacatatcgcacgctcgggcaagacacacacataaacacacaaacagctcactccagcaacacacacacactacaacctccacaccccagcacacgcaggcaccacagacccccagtatcatcccggaacagcacacacagacaactctcaccgacaacacacgcaggtccacccaccccacaagcagggcacccacagacagaaccccacacaaacaggcgcggggactcacgcagacaccccgacgggtcagaaaccccaacattcctctggatcgacaccaccactccctgcagaacccagcacaaactcggagccagacacgcgcacacacccaggcgagacacctgcagatccacaaccccgcacacgcgcgctcccacggcggtcccagacacccccctccgctgtcacagccccccccaccgccgccacgtgcgcccgccccgcccgccaggcgagcgcggggccaataaccggctgttgctggggcgcagcccccgcccgcaggagccgcagactccacggcccgcgagccgccccccgtcgccgcccccagcgggcgcgcgccctgggtgtggccgcccctccgtgccgcccccccgcccctcccggactttgggggctggggcacccctggggtcgaccctcttccccggggccgcactggccgccagggggcgctgccgagcccgcaccccattgtttgtaaacaaacccgccagaccgccgaggcacctgtgcgcccagaccggcgccccaacgccgagccgcctctcacccggcgaccctggcccagggtccctcgcggggtttggagaggcgcggtgtggggaggcagggcgcccacactgctctccgcctgcactcctgtcacctcctccagggagtccacccggcctggccgatcgccgccggagaggattcggggcgcgcacactcaccccgggggcatgaacacgccggagggggcggcggtggggggcgggcggcttccttcaggagggcgcgcccgccgagcgccgctctccgcggcggctgctgctgtggctgtcgctgctgctgccgctctaactgcagtggcggctgctgtggctgtggctgctgctgctccccgggccgcaggcgcgtccgcgtcgtggccgctgctgggatcgctggtgccgccgccgccgccgccaggcgcccgctcgcatgtggctcgcgccgcgtctcaggccgcccggcggatcccgggcccgctccaaagccgccccgccccgccccgccccgcccccgcccggcgggtcccacgccccgcccccgcgtgacgctacggccccgcccgcccgccgcggacaagtcaggacttgcaggcgcgcgccgcgcccccccctacctccgcgccgggggtttccctgcagcgggggacggggcagggcctagcccaaggcaaggaggacccaggcgctgtgcggcggggtgtggggagatcgcccagacaccgggacagtcggacacacacactgactgggacccacagatccacacccccagcgatgcgtacacagaccgaccgacgggcgttccagggtccacaaagtcacgtgcaggcagagcccagaggatgtactcacagacacaaggccacagtctcgcaaatccacaccatggacaggggcatgagcacacacactcacatactgatggggctcacacttacacacacccagacggaaatgcacagactcactaacagggtcccctggacaagcagacggacacaatgacagggccacacacagttgcagaaacacccacactgatgatcacacctgggcccacaaactgtgttcacaaacaaccctaccgaacaggcacccacaccacacacacggtggtgcaaccacacagacataggcggagtgcttatcaggaaacacaaacttgctgataggcacaggggacacacacatacacacagacacctgttacagggatacctggatacacggccaaatccaaatcacactcccacagggacatacacaaatgcactcacacaatttcacagctaacacattaaaactatcagaaagtgacattcgcccgacacggtggctcatgcctgtaatcccagcactttgggaggccaaggtgcgtggactgcctgaggtcaggaattcgagaccagcctgaccaacatgatgaaaccccatctctactaaaaatacaaaattagccgggcgttgtggcgcatgcctgtaatcccagctacttgggaggctgaggcaggagaactgcttgaacccgggaggcggaggttgcagtgagccgagatagtgccattgcactctagcctgggcaacaagagcaaactccgtcttaaaaataaaaataaaggaaagaaactgacattcagagacacaaaccaaatcagacatagaagaaactgaccacccacacatgtcacaaagtcacacctgtgacagcttcttgctaactggcccactgcacacacgtcggagcatgcacacctggccacactcaccacaaatctggcaggggacccacgtcgtggaagcagccctgggcacctggcatggacatgcctgggcagaccccatgccaaatttcatcctgtctcatagctttccattccgtttctttttcagtttctcattgttacttcctgccctgctctggtttggtgagttttgtccttcctttttccaaagccgtggattcctgtctcctctacactttccatccttactgggtctcacccaatcgcaatcgcctcaccagagtgactcaccttccagtgcctagtgtggggctggctgagtaaggatgtcagacttctcaaacttgactgcctccaagtacacactcttagctcccccaagagatgcaggtaatctatatctcacgtgaaatctccccatttgcaacattgggaactcctcagctttcctccctctttcactttccctcctctttcgctttccccgattattcattgtcccttccttcttcctggtgttttccaaactgtgggtcatgagtaaaccatggattatgacatatgacatcacttacatggatcttacttttttttttttttttgagacagagtctcgcgctgtcgcccaggctggagttcagtggcatgatctcggctcattgccacctccgcctcctgggttcaagcaagtcttctgcctcagcctccctagtagctgggactacaggtgtgcgccactatgcccagctaatttttgtattattggtagagatgcggtttcaccatattggccaggctggtctcaaactcctgacctcgggatccgcctgtcttggcctcccaaagtgctgggattacaggtgtgagccactgcactcagcttttttttttttttttttttgagacggaatgtcactctgttgcccagactggagtgcagtggcacgatctcagcaaactgcaagctccgcctcccaggttcaggcctttctgcctcagcctccccagtagcagggagtacaggcgtctgccaccacacccggctaattttttgtattttttagtagagacagtgtttcaccatgttagccaggatggtctcgatctcctgacctcgtgatctgccctcctcggcctcccaaagtgctgggattatggcgtgagccactgcacctggcccagccttttttttttttagataaaagattcactctgtcgcccagattggagtgtagtggcacaatggatagccttgtggtacaatagccttgcagcttcaaactcctgggctccagagatcctcctgcctcagcctcccaagtaactgggactacaggtgtaaaccaccacgcccagctaatttttatttttttgtagagatgggcggtctcgctatgttgcccagtctggtcttgaccttatgggctcaagcaaacctcctgcctccgcctccctcagtgctgggattacaggtgtgaaccaccatgcccggctgacttaatgcattttactcagtaagatgcattcacatcccaaccaacttgcgctttactgagatgtatttagacacaagaatattcactctttttaggtgtatggtgtgtaagtggtgataaaagtacacaattttgtattaccacaacttctacctgcaattttactgacctagacaagaggttttgttgttgttttaattgagacagattctggctgtgttacccaggctggtttcaaactcctgcgctcaagcgatcctcccacctcagcctccctagtagctgggattataggtgtgcatgactgctttgaccagagttaaaaaaaaatacaccacaggccgggcatggtggctcacacctgtaatcctagcactttgggaggccgggggacgtggatcacctgaggtcaggagtttgagactagcctggccatcatggtaaaaccccatctctactaaaaatacagaaattagctgggcatggtggtgggtgcctgtaatcccagctactcgggagcttgaggcagaagaattgcttgaacccaagggaaggaggtttcggtgagccgagatcgcgccattccattccagcctgggcgacaagggcaaaactccgtctcaaaacgccaacaacaaaaatacactacaggctgggcacggtggctcatgcctgtaatcctaacactttgagaggccgaggcgagtggatcacttaaggtccggagttcgacaccagcctggccaacagggtgaagccccgtctttaccaaaaatataaaagttagccaaaaattggtggcgcacacctgtagtcccagctactcgggaggctgagacgggagaatcacttgaactcaggaggcagaggttgcaatgagcagatatcgtgccactgcactccaaacagggcaacggagcaagactctgtcaaaaaaaaaaacacactacaaaatacaattttgaggccgggcataggggctcacgcctgtaatcctagcactttgggaggtcgaggtgggtggatcacctaaggtcaggagttcgagaccagcctggccaacatggtgaaaccccgtctctactaaaaatacaaaaattagccgggcatgattgcggtgcctgtaatcccagctactcaggaggctgagatgggagaatcacttgaacccgggagacggtggttgcagtgagccgagattgcaccactgcactccagcctgggtgctgagccagactccctcttaaaaaaacaaaacaaaatataattttaaaaaattatgaagtcaacggaaagtaatattttgtggaaattttattgatgtatagtgaatacatattaggttacaaggaaggtatttttctggccatagatcgagttcaaagacgtttgagaaatgctgctttagacacttattaaatgagatcacactggaagtcatttagtgcagtattggacatatagtaagtgcctaataagtgttagctattatcacttgtataactaattattgtcagtatttcctgttgcttgacactgatgaagttgagagaggggcagtctctagccctctgctagctcatggtcccacctgtacctcacacctctcactcactgatcaatgtccagactgcccattgcagggtagatactcggaggccagatgtactggaatgttctttttttttttttttttaagacggagtctcgctctgtcacccaggatggaatgtggtggcccaatgtctgctcaatgcaaccaccacctcctgcgttcaagtgattctcctgcctcagcctcctgagtagctgggattacaggcacctaccaccacgcctggctaattttttttgtatttttagtagagacggggtttcaccatgttgaccaggctggtttcgaactactgatctcaggtgatccacctgcctcagcctcccaaagtgctggaattacaggtatgagccactatgcccagcctggaatgttctcttcttctcctcctcctcctccttcttcttttttcttcttcctcctcctcctcctcctccttcttctccttcttttttcttttcttttctttttttagtaaagatggggtctcattatgttgcccaggttggtctcaaactcctgggctcaagtgatcctccctccttggcctcccaaagtgcctggattatggtcatgaggcaccatgcccagccccggaatgttctttatttgtttgtttgtttgtagagacagggtctcactatgttgcccaggctggtctcaaattccagacctcaagcaatcgttcctccttgacctcccaaaatgctgggattacaggtgtgagccaccacaccggcctataatgttcttttgagaagaaaatgagtgtgaaggatagtgggaatctggcttggtggctggaggtagaaaagatggggagaggccaagagtctatttggccataagcgttatcactagtcaaaatcctccccacagctgggcgtggtggctcacgtctgtaatcccagtatcacggaaggccgagatgggtggatcacctgagcccaggagttccagaccagcctgggcaacatgcggaaacctaactggggaggctggggtgggaggaacgcttgagcctgtgaggtcgaggctgcagtaggctgtgatcgcaccattgcactccagcttgggcgacagagcgagaccctttctcaaaagcaaaacaaaacaccagcctggccaacatggcaaagcctcgtctctactaaaaatacaaaaattagctgggtgtggtggcacatgcctgtaatcccagctactctggaggctgaggcagaagaatcgattgaacccgggaggcggaggttgtagtgagccgagatcgcgctactgcactgcagcctgggcaacagagcaagactccgcctcaaaaataaaaaaccgacccccacccccaaaacaacaacaacacaaaacccttgtgggcaaagaaaaagaagtttgtgggtgggtcaagggctgcctctttttttttttttttttttgacagggtcttgctctgttgcccaggctggagtgcagtggcatgatcacagctgatgatcacagctcactgcagcttccacctcctaggctcaagcaattctcccacctcagtttcccgagtagctgggactacaggtgcacaccaccacacctggctaatttttaaattttctgtagagatgaggtctcactgtgttgcctacccaggcatgtttccaactcctggcctgaacccattcgcctgccttggtttcctaagcccgcatgcagccctcatgaaagactgtgggctgtgagtccagatggcctgacttagaatcccctctgccacctgtgggtgatgttggggaagtggtcacagctctgtgcctcagtttcctcatctgtgagttgagacagcacaggtccctacctcataggatgtgcagtcagaatgtgaataacaataaaacattgggctaggcacacagtggctcatgcctgtaatcccagcattctgagaaactgaggcaggaggattgcttgagcccaggagttccagaccaacctaggcaacatagtgagacccctgtctctacaaaaaatttaaaaaataatcaggcgtggtggtgtgcacctgtggacccagttacttgggaggctgaggaaggagaatggctggagcccaggaggacaagaccacagacagctgtgatcccatcactgcactccagcctgggcgacagagcgagactctgtctcaaaaaaataaataaataaaataaaaagaccctgttttataaataaataaacaaaaaaaaattaaacaataaaagtactggggcatgatggatgtttaatatatgttacttgtcattactattaccagtgtgggagtccgttgactctctgagaatccaagcaaggaaacctctagctaaggacccctccgcctcttttatgagaacagggtctcactctatcacccacgcttgaatgcagcggtgtgatcttggctcactgcaacctccgcttcccaggctctggtgatcctcctgcctcagcctcctgattagctgggactacaggcctgtgccaccacgcccagctaatttttgtatttttagtaaaaatgaggtttcaccattttgcccaggctggtcttaaactcctgggctcaaatgatcctcccacctcagcctcccaaagtactgggattacaggcatgaaccactggacccggcctggacccctattttttttttttttttttgagacgcagtctcactctgtcacccaggctggagtgcagagtggcatgatctcagcttactgcgacctatgcctcccaattctcctgcctcagcctccttccagttcaagcgattctcctgcctcagcctcctcccagttcaagcgattctcctgcctcagcctcccgagtagctgggactacaggcatgtgccaccatgcctggctaattttttttttttttactttttttttttttttgagatggagtcttgcttgccctgtcacccatgcttgagtgcagtggtgcgatcttggctcactgcaacctatgcctcccaggttcaagcgattctcctccctcagcctcctgagtagctgggactacaggtgtgcaccaccacgcccggctaatttttgtatttttaatagagacagggtttagccatgttggccaggctggtcttgaactcctgaccccaggtgatccaccggcctaggcctcccaaagttctgggattacaggccgtgagctactgagcccggcccaggacccctatttttatggggccaagatgcctgcattctcttctgggaaggatcatcagccctgtgttcaaaagccatgatgcctgaatccagtttggggagagacagcaagtccctgtgttcatggggtcaggatgcccaggtctacttctgggaggaggacagttcgtgtctatttgcacagatgctcatgttgaggctggggtctcaaactagtggtccgcaggccgtccacgagtgcgttttcttgactctgtgcagtttcgtattttgagtgttaatgcctctcccacgggcgcacagcacagaggaacgataactccgacatgggttcaaatgatgaccttgagcaagcagcttctccgctctgtgcctcagtttccctcactgtccaaaagggatctgcacaggcaggaccaaaaatattgtgaagataaaatgagttcgtatttgtaacatacttagaatagtgcccggaggtagtaagccggatgtgaagtgctggtgagacaaaatagagctggttgactgcagacctaaaaccgtctcgtctccaagatcttgtctgccattctgggcaagcagatttcgcagcctggggagagggagttgggaaggacttaacttttcaccgcagggcctgagtcctggctttccgcggtggggaaggggtctcccgggtcccctcggtgtggccggccctgcaggccgggaggctggaccggggccgggtgggggctgggcgggggcgcgggcgtccgcagggtccgagcggccggcgcgcgtgtgaaggttaccgcttcccggcggggcgggggccgcgcgctgttgctggggtctgcggggcctgcctgcgcccgcgccccccctccttcccggccagccagtgagcggtacccgccgccgttgccaggggaaactcgccgccccgttacccagcaacaagcctggcccaaccaggcgcgaggaccccccaggccccgcccgccgctgcccaccgcgtgcccaatgccaggcgggcagagccggcccagctcccggagacggcgagcgcgctcattggccaccgccgcgtccgcccggatctgggggagccctcggcgcggggggcggggaaccgggccccggggagctgccgggcgcgcggcctgcaaacctgcgaccggctggggtgatacccgggctgtgcaccatccacctccctgctcccctgtcccgcactctcgggtgaggatgggcagttgggatgggctggaaacggggttgtgcattctgttcctacccccagaatggcaccctggagttggccttgtgccaccaagggtccccctcccacaaggagacctgagcatcctgactccgtgaagacagggactggttgtttcccgctcccccgctccccgccccgcaggtatcgtggctctggaacataacggttgaagttccctcccagaaaacaacccaggcgtcctggccttataaaaatagggtgtcactgcacccccaaaggacccaggcatgcctggccccgtgaaaacaaggagatgagccccctcctcttaggagatgcagatgtcccagccccgggacacaagaactcagggtccccccagaaggggacacagtcatgtctgatcccaggaaaactagggctgaacatcccactcccacaagaaacacggactcaggcctttgggctcccgaccctgagatgttacagagctcctgggcatcttggccctcaccacattgatgctgggagacactcctgtccctaacagtcaccagaccctcaggtgtccagtttacctaggtgggaccacctgcccagctccaaggtgcagacctgcccacttcccacccctctgagcccttttccccagggtccaggtggttgatctcccaggacgtgggcatctgacttcagagccgctttccttacctgttggcaccgaccccccaccttgcgccagggtcccaggcctcatagtgccaaggaccccagaagtccaagccccgtgtctctgattccccagacacctggccaagcgacccagcccctcacagtgatgtggctggggaggagggagtagtggagaggttggggggccctccccagtcccagacccccaggtctggaagatccagccctgcagcacctttacttggccccgtggatccagactgggagcccccagcctcgagagaccgtaacgtgcatggctgggccacttcagagaggcccaattcctcagtcccctccctcccgggagacccaaggcagagccgcctgcagctccagaccccagctccagacttggtgagcccaggtgcggcccgcccctaccctggtacctggcggggcggagttgaggattactcagcctccagaatgaggcgatgacatcatcctggggggggttgactaatggccgcgctggggggggcggggaagtttacccggtaacagcggctgccgcacggccccgcccccggggaagggctgggagggggaggcacagcctgcgctggcgcacacacaaacacacacacacacacacacacacacacacacagcgcatccctcccccaccgtcccacatctaacacagcttcctggggcaagggcaggggtgcgggggttgggtgtttgtgtgactatgtgtgtgtgtgctggagtcctctgtggatttgtgtcagtgtgctgttgtgtcagggggttcacacattacggtggggttgtgtcagtgtgtgctactgtgtgtcacttgatggattgtgtgtcagtgtgatggtgtgtgtcagcatgctacatttgtcacaatgctacatgtcatgggctgctgtgacaatgtgattgtgtgtcagtgtacaattgtgtgatgttctggtgtgctgtgtgtgatcatgatggtgtgatgtgtgtggttctgtgcagcatgctggtctggcagtgagatgtgtgtgcccatgtgattgtgtcctgacgctgggatcgtatatgtgtcagagtgatgttgtgttgggggaagatctgtgaaggtgctatgtcactgtactgttctgttgtcatggttggatgtgtttgtgtaatgctgggtgtcactggggttgtgtgtgtatgtcatggtgatggtgtgtacgtgtatacaatgctgtgtgtatatgggattgtgtgtgtcactgagtgtgtcagtggtacttgtgttgtgggtgttgggactgtgtatgtatcactgtgatagtgtatgcccatgtgctgtgctgggtgtcgggggaagatgtgcatacatactactgttattgtgtgtgcctggacaatgcggtgcacggtgggattgtgtgtgtgtgtgtgacattatgactgtgtctgaaatgcatatctgtgggactgtgtatcaccgacagtatgtgcatgtgcaatgctgtgtgttactgtggttgtgtgtcattgtggttgtgtttgtcagggtgatgttgtgtgtccatggaactgtgtgtctaatagattgcgtgtatgcaatattgtctctcactgtgcttgaatgtgtcactgttgcgattgtatcactgtgatctagtgagtgtgttgggaccaattggttgtgggatgagtgtcactgtattgattgtatgtcactgatactgtgtgtgtcagggtgatgttgtgtgttcaagggactgtgcatacctcatggagattgcatgtgcctgggcagcactgtgtgtgcctgtggttgtgggtctggggagtgctatgtgtcctgggactgtctgtgtcactaagttgtttttttgttttgttttgttttgttttttgagacggagttttgctcttgttgtccaggctggagtgcagtggcagcgaccttggctcattgcaacctccacctcctgggctcaagcgattctcctgcctcagcctcccaagtagctgggactacaggtgcatgccaccacactagagacggagcttcaccacattggttaggctggtcccaaactcccgacctcaagtgatctacccgcctcgacctcccaaaatgctgggattacaggcctgagccaccgtgccaggcctgagccaccgtgcccggctgtcactgatattttgtgtgtctctgtgatgctgtgtgtctgcgtgttcctgggacctgtgtgtctgtcgctgtgtgtgtcattgtgattgtgtatgtgcggtgggcgacgctgcttgtctctgggacggtgtgtgtgtgtgtgtgcgcgccgctgtgattgtatgtcagcgcgcttcgctgggtgtcgggggaaggtgcgcgtgtctccaggcctcctgcccgagaacagcggcgctgctctctgattggccgcggccgcgccagtgagaagctcccgaatcctgcggtaacttggtaacttggagactcggcccgcgccgcagccgcggggctccgggctgggggctgggagggcggggagggggaggggcccgccccgcccctccggggcccgccccgcccctccccgccccgatttcgcaggcccgccccgagcgcccctccccggccccctcgccccgtctccctcacctccagctcggcacctctgaccccctactttgactccatctcccacacccttgcgtcgctcctgactcccctatctctgccactcgctgggtctctctgtctctctctttcccatgtttatctctcctgtctctgtctccctgtagatctctctgcctttgtctctgtctctcatatcccctctctgtttcttccatctgtctctcccatcagtctccaccactgctgtctctccccgtctctgtctccgccacctctgtctctcctagtctctctccgctacctctgtctctgccatctgtctctatcatctctgtctctccctgtctctgtctccatcatctctgtctctcccagtctctgtctccatcatctctgtctctccctgtctctgtctccatcatctctgtctctcccagtctctgtctccatcatctctgtctctcccagtctctgtctccatcatctctgtctctccgtgtctctgtctcccccatctctgtctctgtcgctccatctgactctctcagctgtccctcctggattctgtctctctctctctccctcctctgcctcagtctccccacctttgtctcttcttcctgtcgtctctcccacctcttgtctctgtctctcccgcccccctctcccttccccgatgccctctctcttactcccacagccaggctcagaattcacttttcatccttctaagacagccagcggacggttcgctacttcgtcctcgcccctcccctccggcccaggcttctggcagcaggccccacgcagggcagacttcaggaaggacttcccgccctggttcggcacgagagctttatcgctcgggccaggcggaggccgggcggccccgtggcttccggaggcgcccgggcgggatgagctcactgcgagttggccaggatttcatcagcttcctcctgcggacttgcccccgctcctttcccggcccggccgcgcgggcgaatccgccggacgcctgctgcccccgagcggcagaaggcggaagcacaggcgccgcgcaaaaagcccacctttgcaccagacgatgtcgccagctcaggaagcctgcaaatacaaacccaattcatcctcacaaccaccaggggagatggactatacatatatatattttgaggcggagtctcgctctgtcgcccaggctggagtgcagtggcgcgatctcggctcactgcaacctctgcctcccgggttcaagcgattctccttgcctcagcctcctgagtagctggaactacaagcgcctgccaccatgcccggctaatttttgtatttttagtagaaacagggtttcaccatgttggccaggatggtgtcgatctcttgacctcgtgatccacccgcctcggcctctcaaagtgctgggattacaggcgtgagccaccacgcctggccccatttattcttatatccactcattcagcaattaccacagagtctcccctgtgccaggcactggtgcagttgtaggcatgaggatacagctgtgagcaaaatggatacaaatcctgccttcatgggactgacactctggtctgtggcagaccacacaccaggagaacacagtaacaatacaaagcgaaacttcaagtagaaaaaggaagcagggaagggccgtcaggagtgttgagggatggtgtctttgaaaaagtgctatttgccgccgggcgcggtggctcacatctgtaattccagcactttgggaggccgatgcagaaggatcatttgaggacaggagttcgaggccagcctggccaacatggcgaaaccccatctctaccaaaaatacaaaaattagctgggtgtggtggtgcgtgcctgtaatcccagctacttgggaggctgaggcaggagaatcacttgaacctggaagtgggaggttgcagtgagccgagatcacatcattgcactccagtctgggtgacagagcgagagtctgtcaagaaagcaagcaagcaagaaagcaagaaagcaaggaaggaaggaaggaaggagagagaagaaagaaagagagagcgagcagatgggattggctgaggtactggatgtggatgtgaaggacagagaggcgtttagggggcagccggaaggatgaaggttctgagagaccaattgtcatcatcatcatcatggcagctctctgagttcacctactgtgtgctaggctccgtgccgattcagagctttacatacatgacctggttacatccttatgaccatccatagatccaggaagcagagacgggagctgtggtaggattcaagatttttatacacatatatatatatatatatatatatatataggtttgtttgtttgtttgagatggagtcttgctctgttgcccaggctggagtgcagcggcacgatctcagctcactgcaacctctgcctcctgggttcaagcgattctcctgcctcagcctcctgagtagctgggattacaggcacgtgccaccatgcccggctaatatttgtatttttagtagagacggggtttcaccatgttggacagggtttcaccatgttggtcaggctggtctcaaactcctgacctcataatccacccacctcggcctcccaaagtgctgggattacaggcatgagccaccgcgcctggcccccttttttttttttgagatggagtcttgttgctgtgttgcccagggtggagtgcagtggcatgatctctgctcactgcaagctccacctcttgggttcacgtcgttctcctgcctcaatctcctgagtagctgggactacaggcgcacgccgccaggcctggctaattttttgtatttttagtggagacgggtttcactgagttagccaggatggtctccatctcctgacctcgtgatctacccgcctcggcctcccaaagtgctgggattacaggtatgagccactgtgtccagcctttttctttttttttagacagggtctcactctgtcactcaggctggagtgcagaggtgtgaacatggctcactgcagcctcaaccttccaggcctaagcaatcctcccacctcagcctccctcctgaatagctgggactaccttcttgtgccaccatggccagctaattttatattattttgtagagatgaggtctccccatggtgcccaggctggtctataactcctgggctcaggtgatccttctgcctccgcccccccaaagtgctgggattataggcatgagccactatacatggccttattttttttaagacagtgtcttgctctgttgcccaagcggagcagtggtgtgatcacagctcactgtaatctcaacctcctgggctcaagtgagcctcccacctcagcctcctgagtagctgggaccacaggtgtgtgccaccatgccctgctaattttttctttttaatttcttttatattttattctatttatttttgagacagagtcttgctctgtcgcccaggctggagtgcagtggcacaatctcagctcactgcgacctctgcctcttaggttcaagtgactctcgtgtctcagtctcctgagtagctgggattacaggcccgcaccaccatgcccggctaatttttgtatttttagtagagacagtgtctcaccatgtcactcaggctggcctcgaaccactccaggcctttttaaattttatattttattttgtattttatttattttatttttagagagagggtcttactatgttgcccagatgcccaactcctgggcttaaatgatcctccttcctcagcctcccaagtacctgggaccacaggtgcacaccaccacgcctggctaattttaaatttttttgtagagatggggggggggaggtctcattatgttacccaggctggtctcgaattcctggcctcaagcgatcctctggccttagcctcccgaagtgctgggactacaggcctgaaccaccgcgcctggcctctacctattcctttgtttagctgtttgttgtctgtcttctggagaaagtgagctccatggcggcagggacattctaattcccatttcacagatcgggaaactagaaggaggcccggcacaaagtaggttctcatgggttcaggtttgttgaatgaatatgcgtgtctgtttgtctcaagcggcagggagtgcgccgcaccgccccctggtggagagtgggaaacgtgtccgccggcgtgattatcaaatttcctgggagatcttcaagtccgcccttagccactgcgtactaacggtagaatttaactccattccacaaataaacacaaagtattttttatgattatttttgaacttgtaaaatttgttttttgatttcttgagaccattgtttaagctgtagcataagttacacacttctctaaagcctcccaattctttttttttttaggaacaaggtctccctcgccgctcaggctggaatgcagtggcacgatcagagctcattgcagccttgaagtcctgaagctccagactcttttttttgttttttgaaacgcagtctcgctttgtcgcccaggctggagtacagtggtgtgatctcggctcactgcaacctctgcctcccaagttcaagcaattctctaattctctgcctcagcctcctgagtagctgggatgacaggcgcccgccaccatgcccggctaatttttttgtatttttactacagacgggtttcaccatcttggccagggtggtcttgaaatcctgacctcgtgatccacctgctttggcctctcaacgtgctgcgattacaggcataagccaccgcacctggccctctttttttttttttttgagacagagtctggctctgtcccccaggctggagtgtgatctcggctccctgcaactctgcctccctgttccagtgattctcttgcctcagcccccggagtagctgggattacaggcgcacgccaccacgcccggctaatttttgtatttttagtagagacagggtttcatcatgttggccaggctggtctagaactcctgacttcaggcgacccacacccgcctcggcctcccaaagtgctgggattacaggtgtgagccaccacacctggccttttttttttttttaaagagtctcgttgtgtcgcccagtctggagtgcagtggtgtgatctcggctcactgcaacctccaactcctgggttcaagcgattcttctgcctcagcctcccacatagctgggactacaggcgttcgccaccacgcccggctaatttttttttttttgtatttttactagagatggggttccactgtgttagccaggatggtctcgatctcctgacctcatgatccgcccgcctcaacctcccaaagttctgggattacaggcgtgagccaccgcgcccagccttttttttttttttttttttaatgtatttgcttgtcgttaatgggatagtaataaggttgaggtttttgttaaggggagtttacttatcattaaactctgtagttactactacaaggaaactcttcccaagtacattaaacactaggttttataatatttgccacactgccaataaattctgttcacatattaagtatgacaagtccactatatgtaacatgtaagaatgctatactaggccgggcacagtggctcacacctgtaatcccagcactttgggaggctgaggcgggcagatcacgaggtcaggagatcgagaccatcctggctaacacgttgaaaccccgtctctgctaaaaatacaaaaaattagccgggtgtggcggcgtgcgcctgtagtcccagctgctggggaagctgaggtaggagaacggcgtgaacccgggaggcagagcttgcagtgagccgagatcgcgccactgcactccagcctgggtgacagagcgagactctgtctcaaaaaaaaaaaaaaaaaaaaaagaatgctatactggcagtagacctagggccagaataaattggcaagttttcattccatataaatgtgggaaaaaagtgagtacaacttttttttttttttttttttgagacagagtttcactcttgttgcccaggctggagtgcaatggtacgatctcggctcaccgcaacctctgcctcccgggttcaagcaattctcctgcctcagcctcccgagtagctgggattacaggcatgtgccaccacacccagctaatttttgtatttttagtagagacagcgtttcaccatgttggtcaggctggtctcgaactcctgacctcgtgatctgcccgcctcggcctcccaaagtgctgggattacaggcatgagccaccatgcccagccttttttttttttttttttttttgtgagaggaagtcttgctctgttgcccaggctggagtgcagtggcacgattttggctcactgcaacctctgcctcctgggttcaagcaattctcctgcctcagcctcctgggtagctgggactacaggtgtccaccactacacccggctaatttgtttgtatttgtagtagagacggggttttaccatgttggcgaggctggtcttgaactcctgacctcatgtggtctgcccaccttggcctcccaaagtgttgggattacaggcgtaagccaccgtgcccggccacatgaaatgtttaatgtggttgatctcagcttcattcacactgacttcagggagtctggttttctatgctcaagattgttctattgctgatttgccgttgttttgttttctttcaggatcaaggtgggtacttttttttttctttgagatggagtctcgctttgtcgcccaggctggagtgcggtggcgccatctcggctcactgcaagctccacctcctgggttcacaccattctcctgcctcagcctcccgagtagctgggaccacaggcgcatgccaccacgcccggctaattttttgtattttttttagtagagatggggtttcaccatgttaaccaggatggtttcgatctcctgacctcgtgatccatccagctccgcctcccaaagtactgggattacaggcctgagccaccgcgcccagcttttttttttttttttttttaatagagatggggatgggaggggtctcactactatgcccaggctggtgacaaacttctgggctcaagtgatctaccctccttggcctcccaaagtgctgggattacaggagtcagccaccgcacctggcccctcccaaactcttaagtgcagaactccatgtaaccagcacctaggtggagaaacagaacgttcttagccccatttcctgaccctgattaccctaattaccctcagggtaatcattatcgtgaattctaacaccagagattagttttgcttgttttagaatttcatataaatggaccatgaaatatgttctctttggtgtctgtatgcctttgttatgcagcctaatgtttgcaagattcatgcatgttcttgtttacttttccttttttttcctttctttctttcttcccccgcctcccccgcctccccacagagcctggctctgttgcccaggcttgagactcagcctcccaagtagctgggattacaggcccagtgccaccacgcccggctaatttttgtatttttagtagagacggggtttcaccatgttggccaggctggtctcgatctccctatctcaggtgatccacctgcctcggccgcccaaagtgctgggattacaggtgcgagccactgtgcccagccttgacttccttccttccttcctttcgagacaggggtctcactttgttgtcgctcagtctggcgttgaactcctggcctctagtgatcctcccaccttggcctccccagtgctggtgcaccactgcaccctgctgattgatcactttcagtgttgcagagtctttcactgtgtaaagacaggatcataactcactgcaatctcgacctcctgggctcaagcaatccttctgcctcagcctcctgagtagctaggaccatgtgccaccatgcctggctaattttattttattttattattattactttttaaaatatgctgactttagttatttacttttttttttttttaagatggagtctcactctgccgccaggctggagtgcagtggtgtgatctcggctcactgcaacctctgcctcccaggttcaagcgattctcctgcctcagcctcctgagtaagctgggatcacaggcgtgcaccaccacgcccggctaatttttttttgttttttgttttttgtttttgagacagtctcactctgtcgtcgaggctggagtgcagtagcactgtgttggctcactgcaacctccgtctcctgggttcaagcaattctcctgcctcagcctcccaagcagctgggactacaggcgtccaccatgacgcccggatagatttttcttttttttttttttcttgagacggagtctggctctgttgcccaggctggagtgcagtggcgtgatttcagctcactgcaagctccacctcctgggttcacgccattttcctgcctcagcctccctggtagctgggactacaggtgcccgccaccatgcccggctaattttttttacatttttagcagagatggggtttcaccatgttggccaggctggtcatgaactcctgacctcaggtgatccacccacctcagcctcccaaagtgccgtgattacaggtgtgagccaccgtgcctggccacgcctggctaattttgtgtgtgtgtgtgtgtacttatttttttgagacagtgtgtcgctctgtcacccaggctaaagtgcagtggcgggatctcagctcactgcaacctctgcctcccaaattcaagcaattcttctgcctcagcctcctgagtagctgggactacaggcgtgcactgacactcttggataatttttttttttttgaggtggagtcttgctctgtccctcaggctggattgcaatgacgcgatctcggctcactgaagcctccgcctcccgggtttaaacgactctcctgcttcagcctcccaagtagctgggattacaggtgcacaccaccacacctggctaatttctttttgcatgtgtgtagttttagtagagacgggatttcaccatgttggccaggctggtctcgaactcctgacctcagatgatcctcctgccttggcctcccaaagtcctgggattacagacatgagccaccacgcccagccgaggctgagtctttatcttggggactggcctgggcattggaaggtgttcaggagcagccctggcctctgtccactagatgtcaagaggaccctctcttgtgacaaccagaaatgtccctagtcattgagaaatgtcctttagggggcaaaattacctccattgagaaccactggataagaacacggagtttgaggatgcacaaaagggagtgatgtggctggagagggcagcagcggtgacacacacaccactcaggctccatcaagtcagctctccccagggtgctctgggcagcctctttctgtcagaacagttgccatagtttgaatgtgtccgtcgaagttcatgtgttgaaaacagtcggcagggcgcggtagctcacgcctgtaatcccagcactttggaaggccgaggcaggtggatcacgaggtcaggagttcaagaccagcctggtcaaaacggtgaaaccctgtctctactaaaaatacaaaaaaaagtagccagacatggtggcagatgcctgtaatcccagctactcaggaggctgaggcagcgaattgcttcaacctgggaggcggaggttgcagtgaggcgagattgcgccatcgcactccagcctgggcaaaaagagcaaaacctgtcttagaaaaacaaacaaacaaacaaaatatatatatatatttatacaaacacatacacacacatatatggagagagagagaggtgggggtcccactatgttggccaggctgaccttgagtgagctcctggccttaaatgatcctcccacctctgcctcccaaagtgttggaattacaggcatgagccactgtatttggcctaatttttaattttttttgtggagactaggtctcactctattgcccagactggtttcaaattcccgagctgaagtgatctgcccaccttggcctcccaaagttctgggattacaggcatgagtcaccgcactggcctcaagtgaatttcgttacatgcatagattgctatttggacaattataagaggattaagtttcattggtatctctgaaaggctgtgaacagtagccttagaaatggtaaggaattaccaggtacttccactttctatgtcttaaatcacaaaataaaatgactggcactacaggcaatctggtctgtccacttataactgtcattcaccttaactgagggtattctgtagcattcatcatcatttgtcacaatacctttattatttatttatttattctgagacagagtttcactcttgttgcccaggctggagtgcagtggctcaatcttggctcactgcaacctccatttcccaggttcaagtgattctcctgcctcagcctccccagtagcaggggttacaggcgtgagccacagcgcctggtcggcttgtcacactagctttattatgtctaagttttggttaatgctgtaacctcctggactctgcagctattcagctgctgttgctttgagtatcttctagttttgggaatgcaccaagctcattcaccacagggcctttgcataggttgtgtccttggcctgcacaggcagcctctcaccctccggcctctcctgcccctcttgccaggcatctcccacaggtgctgctatttcccatttacttgtgtcttcccttaggaggacaaggatggggtcagctttgttcatcatctcagttcccccaccaacttttcctcccagcacgcagcctggcagtcaatgctgatttgggagaatgaacgactgattctatcggttgaacgtttattttatatatatatatatatatatatatatatatatatatatatatatatactttttttttttttttttttttgagacggagtctcgctctgtcgcccaggctggagtgcagtggcgtgatctcggctcactgcaagctccgcctcccgggttcacgccattctcctgcctcagcctcccaagtagctgggactacaggcgcccgccactacgcccggctaattttttgtatttttagtagagacggggtttcaccgttttagccgggatggtctcgatctcctgacctcgtgatccgcccgcctcggcctcccaaagtgctgggattacaggcgtgagccaccgcgcccggccttattttatattttatgatttcatttacttatttattttcgatacggagtctcactttgtcgcccaggctggagtgcagtggcacgatcttgcctcactgcaacctctgcctcccgggttcaagcaattctctatctcagcctcccaagtagctgggattacaggcatctgccaccatgcttggctaaattttgtatttttagtaaagacggggtttcaccatgttagccaggctggtctcgaactcctgaccttgtgatccacctgcctcggcctcccaaagtgctgggattacaggcatgagccactgcgcctggccagttatttatttttttgagacgtagtcttgctctgtcgcccaggctggagtgcaatggcacgatctcagctcactgcaacctctgcctcccgggtttaagcgattctcctgcttcagcctgtagctgggattacaggtgttacaggtgcccgccaccatgcctggctaatttttgtattttttagtagagacagggtttcaccacgttggtcaggctggtctcaaactcctgacctcgggtgatccacccgcctcggactcccaaagtgctgggattacaggcgtgagccacggcgcccggcctattttattttgagacggagtctctcgttctgtcgcccaggctgcagtgcagtggtgcaatctcggcttactgcaacctctgcctcccgggttcaagcgatgctcctgcctcagcctcccaagtagctgggattacaggcgcccgccaccatgcctggctaatttttgtatatgtatattttttgagacggagtctccctgtgtcgcccaggctagagtgcagtggagcgatctcggctcactgcaagctccgcccccggggttcacgccattctcctggctcagtctccggagtagctcggactacaggcgcccgccaccacgccgggctgattttttttgtatttttagtagagacggggtttcaccatgttggcaaggatggtctcgaattcctggcctcaagtgatccgccctcctcggcctcccaaagtgctgggattacaagcgtgagccactgcgcccagcattttattttattttcgagaaggggtctgctctgtcgtctaggctgcagtgcggtggcatgatctcggctcactgcaacctctgcctccccggttcaagcgattctcctgcttcagcctcccgagttgctgggattacaggcgcgcgccaccacaaccggctaattttttttgtagagacgggatttcacaatgttggccagactgatctcgaacttctgacctcaggtgatccgcccgcctcggcctcccaaggtgctgggattacaagtgtgagccaccgcccacggccggtagaacatctgaagcttctaaagcgaactctaaggtttcattggcacgagggggctcgaaccacgccaggcttccaggcgtcagtgcccagtgcttggcatctactgatagaaaccaggaatgaggggctggaggcggaaacagcttgaagaaagaggtagaggccagggagtgaggacggtgtctccttttcctggaagttggtaattcaggcagaaggaagttggatgagcttgcggaacacccggggggccagtcggccccgctcccgcatccatcgcggaggcgcggcccctttaaggctcccggaaacggtcccacaggaccggaagtgaccctctttatttcccttcctcacgtggtgcaggcaggaagtgacgcgcctggcccgggagctgcggtcgcagaggccgacggagccggagtcgcggacgccgcggggtctccgggacaggtgacctgggggagggggccgggagcgcgcccagagaaggcggggcctgaagccccacgtggcggggagtgcgaacaggcccgggcggggtcggagttctctgcggggggcggggacaggacgcccacatgggaagctggaggggcgctggcggggcgggccgttgggtgggtgggcagggtcggggcggggcgtggccagagcctgggccggcggctgtgggcgggacctaaaagttgtggctggactgtgggcggggccatagtgttgcttgttcagctgtgtggcggggctcggacgccgggcggaagctctgtgggcggggccagaaagttttgccttactggaagtgggtccagattcttggccgggacgttgggggcggacccagaggctgacgcaatggcgggggcggggccacaatgtagtgggggagccagggggcggggccagggtgctggcggggaatgctgggggtggagccagaaagtttcgtctgagccacgggcgcggccagagcgttggccgggaggcggggaagcggggagttgagccagaaccctggggaagccatgggcggggccagatgctgacgcaacgaggtgtgggagggagtcagggggcgtgtccaggaggttggccaggccaatcggaggcggggccagagggttgactgggcaggccgggggcggggctggaataataataagagatggtaggggcgggtgtaggctgttgcctgcgagccaggaggcggggaaagagcgtggctgggaaagtcgggagcggggccacattaatggcccatgggtgggggcggggccagaagtctggcgggaaaggcggggccagaaagttttttcccgagccgtgggcggggccagagcggtttccaggatgtcggggacgtggccctggcattcccagccggattgaggctggagctttgcacagaaaatctggggcgggcctgggtagttttgtccttgttggggcgggtggagtattcagtggggcaaaacgccagttccaggaagcctcgccagtgagttctgggcctgtgtacagaatcctttcgggggaggcgggaggctgtcgaccttccgtagggcgctggagacgggactaggacgtccctgaggaaggcgcgggcttggaatgttctctgagagcttgggcagccaataagagtggggttcggactttctttgagcgtgggattgggaatgtttctgaaccttacctggtggagctagaatattcgcctggatatgagaggcaccaggatgagcacagggaggtgggtctggaactttcttttgcaggctggttggaggggttgtagttggaactctcttgagatagggaacccgggctaacactcataccacagggtgtggcggctggcctagaatcagcctttggaggagagcagtgttggatacttaagcagtgggtgggggccagaacatccccaaggtgggtttgactagatcgtttacatgggaactgggtgagtccacaaagatcatgaaagggctgagtctgaatttctatggagaagatggaggtggcagttgaaaggagggagagtgagggctacaattctcttggggtacagggttttttgtgtatggctgtgaggatcccgcagtatgttagagggtgaagtaggttggggggccattggcctttgtcctttttttccctctgtccccaggaaccctcagtgctgcgtctagattctgcaggggaggtttgctgggaccttggctccacgcagccagcgaaatggtgaggctgaaaaatggggtctctagaatctgagttttggggaagggggcttgggaggatgggatccataggggcagactctcagaccctgggggaaagtccctggtatggatggaggtttttccttccatccctcaactgcctcccggtctcaggcagccacactcgatttgaaatcaaaggaggagaaggatgctgagttggacaagaggatcgaggctcttcggcggaagaatgaggccctcatccggcgctaccaggtgccctagccccgccctgggagaccccatcccctctcttccccgcagtgagtttttctcacctctcccttccttaaaaccttttcatggctccccatcactgtcaggataaaggccaaaggccttagcctgacatcccttctttcattccattattcattcattcattcatttgttcacaaatattccccaagatctttaccagccccagtgctgagtggtgctggggatatagctgtgactgagacagacccaggcctgccccctccagggtccaccgtctagtcagggagacagccctgtcctcagggatgccccagagcagacaagtctggaatcaggaaattcaggggtctgtgggagtccagaggaggctcttgacccagccttggggatatcagggagggcttcctggaggagtggactctgaggcttgagtggtgagtagacaatagccagttgaaaaggcgaggggaacatgtttcaggcagaaagaacagtttgtgcaaatgttggaagcaagagagagcttggagcttcaagttggagggttggttaggagagaattgacctgggcaggtcagcaggggccaggctgtgctaggccctgaatgccaccaggatgagtttggactttgtcctgagggcactggggagccagggagagccttgagcaggggtgggaccggtcagaacagctctttaggaagacgcctctgggtgctgtgcggtggtgggtgcgaggaggtgatactggagcccagagaccaaggaggaagctggggctggaaccctagtgggagaggaggtacctggctcagggcagggctgttgagagggactcagttactgatgggcagttcagggcagggggaggaagagggaggatttaggacaaggctgctgagtaggtgatgtggctctccctgagatgggatctgggaggtggcatgggtttcatttattcattcttcatgtattcattcattttaaaaaaggcatattgaatttcccttgtgggccaggcagcgttctagacttgggatacacgtcagtgacatacatcactgaaagcagacagacattcctgtccccaggcagattctgccgtagtggaggaagcagacagtgagcgagacgcatatggtgctgggtgcaaatgggatgagaacagagagggtggcaggggagctggtttccacagggtgctcagggaaggcctcacgagaaggcagcattggagcagagacctacaggaggtgaggggttggagggtctctgggaaaagtgttcctggcagagggatccgctggcgcaaagcccctgaggcaggtttcagcctggtatgttgtgggaatagcaaggaagccggagtgatcgtggggagagggtgagagatgaggtcggggaggtaccaaggccagaccccacgggtcccacaggctgtggggaaggctgttactcagaggggcaccacaggaacgttctgagtggggctgcaacgtgctgaggtttgagggatatgagcggccttcttgttcagagtccaggagagaggcctgggctggggccagacttaggaggagttcaggggtctgggagtccgtctggcagacagggcacctgatgcttccctaccccggctgtctgctcctaggagattgaggaagaccgtaagaaagctgaacttgagggagtcgcagtcacagctccccgaaagggccgctcagtggagaaggagaacgtggcagtggagtcggtgagctcgtcactggggtgtgggaccctgaggatggggaggggcagagggttgaggcctgggacccaggagcccccagctgtcctgcaccagtgggtggcctccatcctggccgcatgcctccctgccccagtgactgtattttccccatctcccctcttccaggagaagaacctgggtccttcccggaggtctcctgggacccctcggcccccaggggccagcaaggggggccggactcctccacagcagggaggccgggccggcatgggccgagcatcgcgcagctgggagggcagccccggggagcagcctcgaggaggaggagctgggggccgtggccggaggggccggggccgaggttcacctcacctctctggagctggagacacctcaatctctgaccgtaaatccaaggtaggagctaggcagcgcctggagccctggctgaggttctctgttgtctgtttctgttttttcctcctctcagatgcacatttgtcctgtgtgtccatctttcagtatctctctctgagcctttgcatctggctctgtttctctcttcctccacctccttctcctcctcctgctccccctcttctagttccccctgttccttccctctcacgcctagagctcgtgtgtttttccttgtctctttctctcctactcctgctccccgtcttcttgttcctcctcgccttccttccctcccctctcctgcttagtgctgcgtgtccctccctgtccctctctgtctccctttttctcgctctctggtgcatgcttgcccactcatcctccgtccccatctctcctccctttctggcactgtgtgtctgtctggtgggctctctctatctggtgtgcttgtgagcacaggctctgtgtggcattctgtttctgtgtgtttctcttggtccccggctttggttatggggagcagtgattttactgtaactacctcactcacccctgacgtgcaggtcagcagggtgggagtctgtctagctgagtggcttacagcccaccgtggacatgggttgaatctggttctgtgagctacctggccttgggcagctcacttcccctgtgagcttctggttctagcacttacacgggaataagaaaattcaaaaattagctggacgtggtggtgggcacctgtaatcccagctacttgggaggctgaggcaggaggatcacttaaacctgggaggtggaggtcacagtgagccgagatcatgccactgcactccagcctgggcgacagaatgagactctgtatcaaaaaaaaaaaaaaaaaaaaaaaatgctgggcgtggtggctcacgaggcctgtaatcccagcactttgggaggctgaggtgggcggatcacctgaagtcaggagttcgagaccagcctggccaacatggcgaaaccccatctctactaaaagtacaaaaattagccgggtgtggtggcacacgcctgtaatcccagctactcgggaggctgaggcagaagaattgcttgaacctgggaggtggaggttgcagtgagccgagattgcgccattgtactccagcctggacaacaagagtgaaactccgtctcaaaaaaaaaaaaataattagacttaaattgggcatgccaagctgctgtcacacaaagactccaaaaatttcatgacctaagtggagtaggagtttatttctcccttgtatgctgagccctgcagggaggtgggtggtccagggggtgaggccctgctccatgatgtcactcagggacccaggttcctgctttttttttttttttttttttcttgagacagagtctcactttgttgcccaggctagagtgcagtggcatgatcttggctcactgcaacctccgcctcctgggttcaagcaattcttgtgcttcagcctcccaagtagctgggattacaggtgtgcaccaccacacccggctagtttttgtgttttcagtagagatggggtttcgccatgttggccaggctggccttgaactcctgacctcaggtgatcctaccgcctcggcctcccaaaatgctgcgatgacatgtgtgagctgctgcgcccggcctggttcctgtttttgttgcttggtggcccctaggtcctggtcattgtctgtggtaacagctgggttgccgacatggttgcggttcagttcacaggaaggggaaagataagtctgctttatcacttttggtcatgtcctgttggtgagaacttagacacctggtcatacctaacctcaaaggagactgggaaatgaaaacgttgtctacagctggctggctatttgcccatctaaaattttgtcactagcttggttactagtaacaagtagttactagctacttggaatgctgggtgctgtggtatgggcttgtggtcctagctacttgggaagctaaggtgggaggatcgcttgagcccaggagtttgagaccaggctgggcaacagagtgagaccccatctctataaaaattttaaaaattaactggacgtggtggtgtgcccctgtggtcccagctacttacttgggaggctgagccagcaggatcacttgggaggctgagcctgggaggtcaaggatgcagtgagctgtgaacacacaccactacattccagcctgggcaacagagtaagaccctgtctcaaaaaaaaaaaaaatcaataaatttttgctaccatggaaggaagaaggggagaacggattgtggttggtgggggtaggtcacctaaccatctgccaagtaattactgttattaccaccactatgattgcggcaaccttggtgtgccagggcccccagcaccctgacactgaactcgcaggttcagtggtttgctagaaagactcatggcttagatttatcacagtgaaagagatcacaaagcaaaatcagcagggggcggggtacctgggctgaggtctggaggaaacccggcatgaacttccaagagtcctttccctgtggagtcccaggggatgcgctgaattcctccagcactgaattgtgacaacatgtggcttaccagggatgcccacgagagattcagcactccaggtttttaattgggggctggtttatttttatttattgtatttatttagtttttaaaatttctttttgtttttgagatggagtttcactcttgttgcccaggctggagtgcagtggtatgatttcggctcactgcaacctccgccttttggtttcaagcaattctcctgtctcagcctcccaagtagctgggattacaggtgcccaccaccatgcccggctaacttttgtatttttagtagagacggggtttcaccatgttggccaggctggtctcgaactcctgacctcgtgatccacctgcctcggccttccaaagtgctgggaatacaggcgtgagccactgtgcccgacccgttatttttatttttattttattttattttttgagacagagtcctactctgttgcccaggctggagtgcagtggcacaatctcggctcactgcaacgtccacctcctgggttcaagtgattctcttgcctcagcctcccgagcagctgggattacaggcgcccaccaccatgcttggctaatttttttcgtatttttagtgagatggggtttccccatgttagccagcctggtctcaaactcctgacctcaggtgatccacccacttcggcctcccaaagtgctgggattacaggcgtgagccaccgcgcccggccacttttaaaattttttgtagagacagggtcttgctatgttgcctagtctggccttgaactcctgggctgaagcaatcctcctgccttggcctcccaaagtgcttggattagaggtgtgagccaccatgtcagcctggaggctagttttgaacgcaggccccttctgtctagtatgtactgaaattccagaccccccagtaggaaggcgaatgcagcgtacagcgtgttgttcgcatagtccaagcctggccagccagcctcatcagttcactgctgacctggagcacgctgagagcaaatggtcagatgccagcaggccagtccgaggagaggagcctcaggcctgctgggcagcccgtctcctgcaccggcagcttaatagttctccctgaagctgggtgtccctatctttatccccccaggagtgggaggagcggcgcaggcagaacattgagaagatgaatgaggagatggagaagatcgccgagtatgagcgcaaccagcgggtcagtggtgcgggtgtccccgaggcagggccgagctgcctgggctgcggggagcccgcgccaaccccctgctctgctgcctgcaggaaggggttcttgaacccaacccagtgcggaacttcctggacgacccccggcgacgcagcgggcccctggaggagtctgagcgggaccgccgggaggagagccgccggcacggccgcaactgggggggccccgacttcgagcgggtgcgctgtggccttgagcacgagcggcaggtgggtgttggcagtgaggacacctcggggctctcagggctttgatggggactgcatagcaggaaccagacagatcagggccatggggcctctccttttttgtgccacagcacaggactttttttttttgagacggattctcgctctgtcacccattctggagtgcagtggcaccatctcggctcactgcagcctttgcctcctgggctcaagcaattctgcctcagcctcccgagtagctgggattacaggcaagtgccaccacacctggctaattttttcgtattttgtagagacggggtttcaccatgttggccaggctagtcttgaactcctgacctcaagtgatccacctgcctcggcctcccaaaatgctgggattataggtgtgagccactgtgcttgcccaggattttaattattaaggatttatggtatgttttgtttcctgccaaggtaaatctcccctcattgttaatgacaccagcatttatgaggcacctaccacatggcaggtgctgtgtgaggggtggggacctggcctagaagaggaggcaggggcagtgtccttgcacttggtggtccacccctaaattgtccgtctgttggttcttctgtcagtaccacgtggctctagttgttacagctttgtggtatgtttgagggttttcttgttactaacagtattgtttactgggcacttactatgtgccaggtactgttttaggtgctgaggataagaggtttttttttttttttgagatggagtcttgctccatcgcccaggctggagtgcagtggcgtgatcttggctcactgcaagctccgactcccgggttcacaccattctcctgcctcagcctccccagtagctgggactaaggtgcccaccaccatgcccagctaattttttgtacttttagtagagatggggtttcaccatgttagccaggatggtctctatctcctgacctcgtgatctgcccgcctcagcctcccaaagtgctgagattacaggcgtgagccaccgctcctggctttttttttttttttttttttttttttttgagacagagtcttgccctgttgcctaggctggagtgcagtggcgcgatctcggctcactgcaagctctgcctcctgggttcatgccagtctcctgcctcagcctcccgaaaagctgggactacaggcacccgctaccacgcccagctaattttttgtatttttagtagagacagggtttcaccatattagccaggatggtctccatctcctgacctcatgatccgcctaccttggcctcccaaagtgctgggattacaggcgtgagccaccgcgcccggcgggagaagagtttggaggcagagcccctgccttgatgaggtttcttctggtgggagctgagtaaatgaaaatatagtgagatgtgaggtcctaccaagtgttgtggagaaaaatccagcagctgaggggacagagggatgctacttaggagatctgagagggcctctgtgaggaggtgccacctgagcctagttgattgtgatctctgccttgtcatcgcttccctgtgtgatcctgagcaagtggatgtgcctcggggcttaggggcggggtagggtgcgggacatcaccctgactccctgtgggctggggggcagggccgccgagctggcctgggcagtgctggagacatgacgttgtccatgacgggccgggagcggtcggagtacctgcgctggaagcaggagagggagaagatcgaccaggagcggctgcagaggcaccgcaagcccactggccagtggaggcgcgagtgggatgccgagaagaccgatgggatgtgagtctcctccccgctcctctccccatgtggcacgttgaccttggccctgacttctaagtcctatgcctctctctggtttttcctgctgtgtatgagtgagtgactgccaagtatcctgagatgccatggaccagctgctggagctcagcggcacgtgagagcatttctggttttcttttttttttttgagacggagtctcgctctgtcgcccaggctggagtgcagtggcgtgatctcggctcaccgcaagctccgcctcccaggttcacaccactctcctgcctcagcctcccgaatagctgggactacaggcgtccgccaccacgtccaactaattttttgtatttttagtagagacagggtttcaccgtgttagccaggatggtctcaatctcctgtccttgtgatctgcctgccttggcctcccaaagtgctgagattacaggcgtgagccaccgcgcgcggccgagcatttctggttttctttttgtttttggagacagagtctagctctgtcgcccaggctggatggagtgcagtgggaggatctcagctcactgcaacctccgcctcccgtgttcaagcaattctcctgcctccgcctcctgagcagctggggtgagaggatttcttctgtgttcatgggtatgctgggctgagctgatccaggctggacgctaagctgtgggtcccgctgggcttggcttcttgcagcagggtgaattcactctgcgccagggtgttcattctgctgtccaggctgagggcagcagctgcctggggagcgcttgccctgacatgggcagatgcacaagcaggcacacttcccagttgtgttcgccagcacaccccgcctcactggggcggggaaataagctctgccccctccagtggataggaacaccggtggcggcagggacatcagttccaacgcagggagggcatgaaggctgtttaacagcgattagacctttgcatcctcctgccagcctctgacctgtccccagcaactcagatccctgaatgtctccatgcctcaccgtcacctttttttttttactttttttttgagacggagtctcgcactgttgccggggctggagtgcagtgatgtgatctcggctcactgcaacctccgcctcctgggttcaagcgattttcctgcctcagcctcctgagtagctgggattacaggcacgtgccaccacatccagctaattttttgtaattttagtagaggtggggtttcaccatgttggcctggctggtcttgaactcctgacctcatgattcacccacctcagcctcccaaagtgctgagattacaggtgtgagccaccgcgcccggcaccaccaccttcttaacccagtggcattgttaacctcaagtttgactttgtcccccgattcagtcagacttaaagcaaagccctcattgcatcatcgtcatggggaccaacttccataaccaagaaggagaaggttctggaagagccgataaatagcagtatttaaagatcagcaactttaggttttacctcatcccccattctttcctgtgttgaaagttttcattcacctataacttgttttttggctttggctaaggaggattttgtctgtttgcccagtggtcgggaagcattttgttgtggattgtgaaccaagcctgtgcgagtgtgagaaataatttgcacagatactatagctgatcttcctaaggaggaggcagctgggcttttggggagatgttctcagcattcacaatgagaaagtatttgtttttcttatgtgtcctaaaagcagtttgcaacaagtctgatgaataatgtttgtgtgggccgggtgcagtggctcacgtctgtaatcccagcactttgggaggctgaggcaggtggatcacgaggtcaggagatcaaaaccatcctggctaacacggtgaaaccccgtctctactaaaaatacaaaaaattagccgggtgtggtggtgggcgccctgtagtcccagctactcgggaggctgaggcaggagaatggtgtgaacctgggaggtggagcttgcagtgagccgagatctcaccactgcattccagcctgggcgacagagagagactccgtttcaaaaaataataataataataataataatgtgtgtctgggccaggcgtggtggctcatgcttgtaatccccacaatcccagcactttaggaggccaaggctggaggactgcttgaacccaggaggtttgcagtgagctgttatgatgccactgcactccagcctggaccacagagcaagaccctatctctaagaaaaaaaaatgcatggtgtcttgctttcatcagcatatatttgagtcctcctctatgtcatggaaggttctaggtgatacagcagcaaacaaaacatttctgcctttttggaactaagagtgtagtgggcaaggtgggtaattaagaggtctaatgttaggcccagaaggataatgatgcagagtaagcagccagggtggaggttagaattttagacttagataatctgtgtaataatattatctttttttttttgtttttttgagactgagtcttgctgtgttgcccaggctagagtgcagtggtgtgatttcagctcactgcaacatcgcctcctgggttcaaataattctgattcagcctcccgagtagctgagattacaggtgccagccaccaagcccggctaatttttgtatttttagtagagatggggtttcaccctggtctcgaactcctggcctcaggtgatccgcccacctggactcccaaagtgttgggattacaggcgtgagccaccgtgcccggccctaatattatcttagctgggggttcaggaaggcctcttagcagagccctgaaaggaggtgagggagtgagccagtgaaaaacgtgggaagaacgttccaggagcaggcgctaaggccctgaggcaggagctaggtgtggtggaagagcctgcttagctggagaggtgagggagactggtgggaaaggtcagatagggagttgtgggtcatgtacttgggcaagggtctgtggtgatccccccaaatttttgttttggcgcccacattctgaatctttttgtatttgtcactatgctgtcaaatttgcctcttgcccatcacctggtcctatcctttgttttttttttttgagatagggtctccctctgtcacccaggctcgagtacagtggcttgattactgctcactgcagccttgacctcccaggctcaagtgatcctccctcctcagcctcccgagtagctgagattacaggcacgtgccaccacgcccagctaatttttgtattttttgtagaggtggggcttcaccatgttcaccacgctggtcttgaactcctgggctcaagcgatctgtctgcctcggcctcccagagtgcggggattacaggcttgagccaccatgcccggccctgtcctacttctagtgtcccctgtctggttgaccgtctgtctctgatccgattcctgaccctgacctctcccatcttcttgatcctcttgttaccctgttcccccagctgcccgctcacccgttatctttcccccaggttcaaggatggcccagtccctgcccatgaaccatcccaccgctatggtgagtgggtgcccttggatgagctgaggctcggtctgggagtcaggggtggtgtgtgccacaccttcccttcccaatgacacctgggttctgttgcagatgaccaggcctgggcccggcccccgaagccccctacttttggggagttcctgtcccagcacaaagctgaggccagcagccgcagaaggagaaagagcagtcggccccaggccaaggcagcgcccagggcctacaggtggggcaccccttctgcgggcttgcatacccccagggctctccgcagggcgttctcttctttggcttgctgtgaaggtgtgggtacatctgtctgtccctgtctttgtcttggccctgtctatctcgcaggtccgtggtttgaggggcttgggatctggctcttggttttaccctcatctgtcccctttctgccgtcacccatctcctctcctgctacctgccccactttcgttctgtccttgacacatggggacacacatccgccattccctcagccctccaccatgccagatgctctgggcagctcctccctagggagggtggaggcaggaagccccttcctcctgtctactctccacccaggcatcacccctccctctgttccctctagtgaccatgatgaccgctgggagacaaaagaaggggcagcatccccagcccctgagactccacagcctacttcccccgagacttcccccaaggagacacccatgcaggtgaggctgggctgtggttcagggcacgggcctggggtgggggctcaggacctgtgccttgccctgacttgcctgtgtccccaaagccacccgagatcccagctcctgcccaccggcctcctgaagacgagggggaagagaatgagggggaagaggatgaagaatgggaggacataagtgaggatgaggaagaggaggagatcgaggtggaagaaggtgatgaggaggaaccagcccaagaccaccaagccccagaggctgcccccaccgggatcccctgcagtgagcaggcccacggagtccccttcagtccggaggagcccctgctggagccccaggcccctggcacgccttccagccctttctcaccacccagcggccaccagcctgtgtccgattggggtgaagaggtggagctgaattctccccggaccactcacctggctggcgccctctccccgggtgaggcctggccttttgagagtgtatgaagctggctgcctgtgtgtgtgtgtgtgtgtgtgtgtgtgtgtgtgtgtgtgtgtgcgcgcgcgcgcgcgcgcgcgcgcgcgctagaggggtgtggctggtgggggacccttggggctgggccctgggacccagtgtgccccacagccctgtcagctgagggggtagcgcagcccatgctcttctgtactgtcatgcccgtctctggaatgtccactcccagagcctgccccagcccttcgagccccctccccaataaagaattcacatcctccaatgacattcccccaggtgtgtccttgaacccccttcaactccccctgggccttctctcttggggtggggagatgtcaggcgggaaagggggcttgactggggctccccttccctaggaggtggccagtcagcccctgccttcccggagagtgggcccagcctccgaggaacccaggaagctgaagaggaagggtctgaggcaactccaggtgggggagtgcatggggcatgggatggaggccgctgcttcctctttctctggggctgaggggcagagggcttggggggagtggggtgaatgtgtgtaggtagcagttggaccatagaggtgaggtgaaaagggtgagctcggatagggatggggggctggagccgggtggcaggggtggggcaaaggggcaactttatgggccaagccaataggaatttggtatggaggttgaggaggtggggttaaggaaaggattagaattttggagtcgagctcaggggttttggaaagcactggtttaagagtaatggggtgtggatcggatgccttggctcatgcctgtaatcccagctaattgggaggcgggaggatcgcttgaacctgggaggcggaggctgcagtgagccgagatcgctccactgtactcccacctgggcgacagagcaagactccgtctcaaaaaaggtggttggcgttggtgtactagggcaggagctataggcagactacgaaatttgaactggctcgaaaaggccaaagagatgggcaagggcagaaaactggatttaactgtggctgggattagagttccgaggtgcaacctagtggggcaaattagaatagacatgcgtacccgatcagcattttgggaccgacgaagtgcgagcaagaggccaagcccctctccacctacactccgtaggagtaagatttcgaatctcagatggcctccccttcccccagagtgggattaggattttgggggcagagccaaggaaggactggttagaatagcaggcgttggcgaaggaaaggggagggcgggtcctctaggactggcttggtggaggttgatgaaggccgtgagatggggcgggggtgggagaggacagtttgcagccttgggtggcgcgggggcccagaccctctgtcttgggccacttgttggtcgggagccagatctcgccacacccgcgtttcctcgattgtaaacggttatgttgggagtgtttgctgctgcgtgggtccgctgagaggattagtctgggccccgtaaaccgcttagcgccgagcctgctgtggcaagggctcgaactggatgagagacgtggctagacgggggaggggtgctgggccgggggggaggtgggaagactgctcccctccgctgactcagccccttctctcctcagaggcaggccccgaaggccaggagacggcggagatcaccgacttccagagggtgcgtttctgcaaggtggtggcggcccctccgctgccgggggccgctcgctgaccgcgcccgccggaccgcggcctccgcgctctgcactaacctcccaccgcctcgctcctctgtcctctgcttctgccacactccagccaggagagggttaaatctaaggggggaggagccagggtctgcgagccgggcggggccagggcagtagtcgggtgcaggccccaccaacgggggacgtcacggcactgggacggctgggacgcttccgcgttagtctcccatggaggccctgggcggctcgagccagtcttcaggccgaatctcccgcctccaggattgcatccgaggcctggcagccggtgacacttccgaagggcttgaattactcgggcgccagccctgtcgtattaaacgcagtgcttccgctcacccttgaactgtgtttctggagggggcaggctgggtcgctgtgcttggcgggcttttctgtggcggaagaggcggaaggaaggggtcttcctccacccttctgatccgtcttccctcccccctcccgcaggcctccccgaattcctgaagacgctgctgggaggggactgaagcttccccgccttgatggggagggggcgtgaggaggggtttatctggatttccaggctgtgttctttctaccccagagcctagtctggaccccttggctctagggagagggaaaagctgaccgttggggaggagctgggagaaggggcgcgattgcggtgaggggcggagctggaacctcggggcctgaggtgctgaggatacctgaaagcgggctgagagtgtgctggaggaggcgggtcccgcgggggcggagctaggctgcctgggcggggccggaatcctgacaggcggagttagagcggggggcggggtcagcgcgcgcgggtggggctctggccatgggcatggggcggggccgtcagcgggggcgtggtcggggtgtcgcgcgggaacccgcgcgggaggagagcggggattccggaactagagtgtgggagccagaggccgtagcgggcagggctcgagcactggagtagagcagtccgacaggtagagaagtgagactggctgcggcacagggcgggttagggctccaggcagggcttgagcgggacgagggggcgggctccgaggcgggctagatgcctgggctggatgaagtccgagtctgggaagagaaccgtgttgtggcgggaggaggcggtgattggggtggtggggctaagcgcgggggcggggctggagcgaggggggcggggtagcacctccgcctgtcggtggtggggcggaggctggagggggtgggcctaggatgcggaggcggcagctcgcgtgggggcgtgaccatgctggcgggggcggggccggaggcgggcggtttagagagcggggcggtctgcggggtgggggcggggcctggtgggggcggggcctgtgcggtctgcggcgcggagccgagtgggctgcggggatgcgggggaccagctgcgtgggcggcggcgccgagagccccggaggcgcggggctgagcgagggcccgcgggggcgctggctgcgcttggctccggtatgcgcctacttcctctgcgtctcgctagctgccgtgctgctcgccgtgtactacggtctcatctgggtacccacgcggtctcccgcggcacccgccggcccacagcccagcgcgccgtcccctccgtgtgctgcccgcccgggcgtgccgcctgtcccggcgcccgccgctgcctccctctcctgcctcctgggagtccccggcgggccgcgaccccagctccagctgccgctgagccgccgccgccgctacagcgaccctgaccgccgtccgagccgccagacacccagagagacgccagaggccgcggaggggcgaagacccgggtaactctcccttccaccccaacccggatcgccagccctcgagagctctgtgctccacgccgaggatgcaccgtctctggattggtccggccttcttcctaatgacatcgctcagcgtctctggagccgtcatcccgcggaatgggggcccagggggtgtcagctcggggccttgcctcttgcagctactctgtggtcaggccgggtcctccaccatcaggaagatcccatcctgagctctgtctcctgcccctcctgctgtgggatgctgagcacagagcccacagcccatctgcctcttcacctccctgaatccgtgtccatctgcaataaacgacagcctcggctgcctcgtgctgtgtctgtcctgttgtctgcagagatgcctcccctcccaagtttgtgtgggaaagaccttcctggggtgtggcctttgtctgttttgtcccgggtgggctgttccccttccttaaggagctcttcttttcttggagtagggagaagcagcttagcagcagcagggcctttgaaggtcagacagtgggaagggcttcccagttttttgtgtgcttggagcaaaggacaaatgtctctggggagaagcagagtgtctgccctcgtgttacagcacaggagacaagaggaggggtggggtgatataggacaatagctggggttctgggaattgctgttggtgtaattatcatgtcagggacagaggctgaatcacccagggatctcagttggctgccgagagggaacgatgctggcccacttcctggggtcagagagatgagagtggatggcggcggcggtggtgttgcttctcagcctgtctggaaatctcagagccaatgaccaaagcgctgtgctgccttggaagactggtgcagcctctggcctggggcgctgctaggaaaccaaggccgggaaactgaggtctagcttctgggcaaggagtccgaggtggggaggccatgttccatcctggaagactgaggcctggctctggacagggcctgggatctgacatgcaggaagctggttcctgtccagcctccccgcttgagctggaggccttcccaggagagtgaggctgagcatcttctcccacgctgtggctcctggagatctgtggaggtggttaggaaggtcagctgctctgctcacctcccctttaccccaccaccactccccagagggtggttgtgaaggggaatctaggaagccagcacttctttgtagtcagcataggtgatagttaggggcactgactggggcgagactactcgggttcaaattccagctcctctcattacaaactgtgtgactttgggcaggtcacttgacctctgtgtttctttttttttttttttgagatggagtcttgcactgttgcccaggctggagtgcagtggcatgatcttgctcactgcaacctccgccttctggttcaggtgagtctcctgcctcaacctcctgagtagctgggattacaggtgcccaccaccacacccagctaattttttttttgtatttttattttttattatttttattttgagagaagtctcactcttgtcccccacgcttgagtgcaatggctcgatctctgctcactgcaacctccacctcccaggttcaaacaattctcctgtctctgcctctcaagtagctgggattaaggcccctgccaccacgcctggctaatttttgtattttttagtagagacgcggtttcaccatgttggccaggctggtctcgaactcctgacctcgtgatttgcccacttgggcctcccaaaattctgggattacaggcatgagccaccacacccggcctctgtttcttttttttttttttcttttgagacggagtcttgctctgtcgctcaggctggagtgcagtggtgcaatgtcggctcactgcaagctccgcctcctgggttcatgccattctcctgcttcagcctcctgagtagctgggattacaggcgcccgccaccacgcctggctaatttttgtatttttagtagagacgaggtttcatcatgttggtcaggctggtctcaaattcctgacctaaggtgatttgcccactttggcctcccaaagtgctgggattacaggcgtgagccactgcacccagccttataacttatttaaaatttttaagcattttttgtttgtttgtttaatagaaatggggtttcacactatgttagccaggctggtcttgaactcctgggcttaagtgattttcctaccttggcttcccaaagccctggaattataggcatgagccactgtgcctggccctgcctctgtggttctgtagaatgaagatgctaatggtacttcttcatagacttgctctgaggaataaataaactggtgatctcaagccctgagaacgatgtcacatgttctctctctccaccacctctgtccctcagggtttaaaagccccagctgggatcctctggggatagcaagtcagtccaaagccctggccaccagcaaatggtgagtttgagggaggggcctctccatttcggttcccactggcccccctctctttggttttcatctctcttctcccagccccattttttcctactctttcgtttccttgttgctgtgtgtcctggctcttttctctttctgtgtttgtctctctgcgtctcagtctttctgtgtcctgtttatctctctggtgtctcttggtattgtttctctctcccactctgtatgtctctgactcattctgctcattctgtgtcctccctattgctctctgtccccagctcgttcttttttttttttttttttttttagatggagtcttgctctattacccaggctggagtgcagtggcggtgggattacaggcgcccaccaccatgcccgtataatttttgtatttttaatagagagagggtttcaccagagtggccaggctagtcttgaactcctgacctcaagtgagcttcccgcctcggcctcccaaagtgctgggattacaggcgtgagacactgtgcccagccccagctgattctctttcttctctcctccacacttatcttaccccaacactttcttccaccttgctccccttcccctgcccccgcaccccacagcttccaggtccctagtctcagtgtcccctgtctccttccctttatctcttccttttctcctcctatttctcttggtttctcttttggtctccattgtttaatcttccttttaacaaatattttttgaggctgggcacagtggttcttgcttgtaatctcagcactttgggaggccaaagccagaggatcacttgaggccagaagttagagaccagtctgtgtaacacagcaagacttcatctggacaaaaaattaaaaaattagctgggtgtggtggtgcatgcctgtagtcccaactactcaggaggctgagaggagaggattgcttgagtccaggaggtcgaggctgcagtgagctatgattgcactacttcactccagcctgggaaacagcaagatcctgtctctaaaaaactaaaaaaacaacccacccaaaacccacaattattttttgagcatctgctgtgtgccaaagcttattttaaacactggagacacaggagtgaataaaacaggcaaaaattcctgctctcggctgggcgtgatggctcatgcctgtaaccccagcactttgggaggccaaagcaggaggatcacttgaggtcatgagtttgcgaccatcctgaacaacatagtgagatcctgtctctacaaaaaatacaaaaattagccgggcatggtggtgcatgccttgtagtcccagctactcgggaggctgaggtgagaggattgcttggaggtcaaggttgcagtgagctgtgactgtaccaccgcactccagcctgggcaagagagcaagaccctgtctcaaaaaaaaaaaaattcctgctctcaatggaactgaatattagtgggaacacagacaagaaattcagttaatagccgggtgcggtggctcatgcctgtaatcccagcactttgagagacctaggagggcggatcacctgaagtcaggagttccagaccagcctggccaacatggtgaaaccccgtctctactaaaaatacaaaaattagttgggcgtggtggtgggtgcctgtaatcacatctacttgggaggctgaggcaggagaattgcttgaatccaggatggggaagttgcagtgagccaaggttgcaccactacattccagcctgggtgacagagtgagactctgtctcaaagaaaaaaaaaaaaaattcctgttcttaatggaactaaatattagcggggacaaagacaagaaatgtgattcataactttgagtgaaagcagggtaagggtgatggggatgatggagggtgtggttactgggtagaagcccaagactggtgagggtgaggctggcaggtctctgggggctgagggaacagtaagtgcaaaaaccttcggggtggtgtgcctggcttgttgaaggaatagcgaagaggccagagtggctgaagcaagagggagtggggagagcaagaggaggaggtgaggcaagagaggacaggcagcttgatcagggcctcatggaccacagaatgcaattttttttttttttttgagacagtcttactctgtcacctaggctggagtgcagtggcgcgatctcggctcactgcaaccttcatctccctggttcaagtgattctctcgagtctcagcctcctgagtagttgggatttcaggcacgtgccaccacacccaggtaatttttgtatttttagtagagacagggtttcgccatgttgctaaagctggtctcaaactcctaacctcaagtgatccacccgcctcagcctcccagagtgcggggattgcaggcgtgagccactgtgcccggccacaatgtgcactttggatgaggtgggagccatgggaggcttctgaggtgaggagggtgtgcgctgattcagatctcaagaccttctgactgcgatgtggagaatggactgcagggggcgatggtggaagccaggagcccaatgaggacaccaccgccctggttcaggtgagagaccatggtggctgtgctagagtgttggctggggaggaggggagaagtggtcaaaaatccgtgtgtgggctgggtgcagaggctcacacctgcgatcacctcccagcaccctgggaggccaaggcaggaatatcacttgggcccaggcgttcaagcccaacctgggcaacatagtgagaccccgtctctacaaaataaaaataaacttttttttttaaaatgaaaaaagtaaaagcaaggcatggtggctcatacctgcaatcccagcattttgggaggctgaggctggagaaatgtttgagctcaggagttcaagactagcctgggcaacatagcgagaccccatctgtacactaaataaaaaatcagccaggcgtgatggcttgtgcctgtagtcccagctattctggaggctgaggcaggaggattgcttgagttaaggagttgaggctgcagtgagctgtgattgtatcactgcactccagtctgggtgacagagtgagaccttgtctcaaaaaaaaaaaagtgtgtgtgttgtgtgtgtatactgataaaaatacacatagcataaaggttaccattttaatcatcttaccatctttttttttttttttgagacagagtcttgctctgccacccaggctggagtgcagtggggcgatctctgctcactgcaacctccacctcccaggttcaagtgattctcctgcctcagcctcctaagtagctgggattacaggtatgtgccaccatgcccggttaatttttgtatttttagtagagacgaggcttcaccatattggccaggctggtctcaaactcctgacctcaggtgatccactgcctcggcctcccaaagtgctgggattacaggcatgagccactgtgcctggcccattttaactgctttaaagtgcacagtttcgtggcactaagtacatttacagtgttgtgcaaccatcaccaccattcatctttaaaatgttttcgtcttcccaaaatgaaaccccgtacccattaaacaccatctccccattccccctcccctcagcccctggcgagcactcatctactttctgtctatataaatatgcctgttctggacattttatataaaagcaatcataacatacagggccttttgtgtctggcttatttcacttgagtcatgttttcttttcttttttttttttttgagatggagtctcgctctgtcgcccaggctggagtgcagtggcgcaatctcggctcactgtaagctctgcctcccgggttgatgccattctcctgcctcagcctcctgagtagctgggcctacaggtgctggcgaccacgcccggctaattttttgtgtttttagtagaaacgaggtttcactgtgttagccaggatggtcttgatctcctgacctggtgatccgcccgccttggcctcccaaagtgttgggattacaggcgtgagccaccgcaccaccgcacccggccgcagcgtcctgttgtcaaggcttttctgggtgaaagcaagtatcagtgcttcattccttgtttttttttttcttttttcttttttgagacggagtgttgctctgtcaccaggctggagtgcagtggtgcaatctcggcttactgcaacctctgcctcccaggttcaagtgattcttctgcctcagcttccctagtagctgagactacaggcgcatgccaccacgcccagctagtttttttgtgtgtttttagtagagacggggtttcaccatgttagccaggctggtctcaatctcttgacctcaagatccacctgcctcggcctcccaaagtgctgggattacaggggtgagccaccgtgcccgcctgcttcattcctttttatggctaaataacattccattggccgggcgcagtggctcatgcctgtaattccagcactttgggaggccgaggtgcgtggatcacctgaggtcagaagttcaagaccagcctggccaacatggtgaaacccagtatctactaaaaacacaaaaattagccaggtgtaatggtgcacacctgtaatcccagctattcaggaagctgagacaggagaattgcttgaaccaggaggtgtaggttgcagtgagctgagatcgcaccactgcactccagcctgggcgacagagtgagactctgtctccaaaaaaaatttccattgtatggataggccacattttgcacattttgtttatccgttcatttgttgatagacagttgggttgcttccaccttctggctattgtgaatagtgctgctgtgagcatgcatgtacaatattttgtttgaacttttttttgggcagagtctcgctctgttgcccaggctggagttcagtgatgcagtcatagctcactgcagcctccaactcctgggctcaaacagtcctcctgcctcagcctcctgaggagctgggactacaggtgtgcgccaccatgcctggctaaatttttatttttttgtagagacaggatctccctatgttgtccaggctggttttgaattccagggctcaagtgatcctcctgtcttggcctcccaaagtgtaagagattacaggcatgagctaccatgccccgcctgataatctgtgtttcatttatggaggaactaccaaacaaaatctgtatatatatatatattttttgggacggagtttggctcttgttgcccaggctggagtgcaatggtgcgatctgggctcactgcaacctccgcctcccaggttcaagcgattctcctgcctcagcctcccgagtagccgggattacaggcacgcaccaccacgcctggctaatttttatttttagtagagacagggtttcaccatgttggccaggctggtctcgaactcctgacctcaggtgatccacccgcctcggcctcccaaagtgctgggattacaggcgtgagccaccacgtccactatgcccagccctgaatattcacattttttgctgcaaaaatattaccacgtctgatgggagagaagggggcgcctgcatcaggcctctgagagtgttacataatgcatggtattcactcaaaattgcctttctaaaattggaacaattctgagttctgcaactcatctgtccccaaggactcctgctaagggcttgcggacctgtaatttggcccactgccaaacctagattcatcttaattatttgctcaacatttatttaatggctcagggaaaaaactaactttctggtaattttttaaaagtagagaatgacgttcatttagtaagttcccattgtcaatgacatgctatttttagtgttgtgtggttaggcgaatgcgtgtttgtgtttgtgacggcctggatgagtgtgtctgtgcatgagggtgtggtttttgtgtgactgagtgtgtatatgtgagtgtgagtatgtaagtgtgaatgtgtgtatttgactgtttcagtgtgcatctgtgtgattgggtgtataaaagtgtgtttgctcctctaatcgcagcactttgggaagccgaggtgagaggattgcttcagctcaagttcaagaccagtctgggcaatatagcaagaccaagtttctacaaaacattaaaagattagcagattagcggggtgcggtggcgtgcacctgtggtcccagctacttgggaggctgaggcaggaggctctcttgagcctaggaggtcaaggctgcagtgaactgtaattgcaccgctgcaatccagcctgggtggtgacagcgaggacctgtgtcaaaaaagtatgcgtgcatgtctagttgagtctgtgtgtgattgtacattgagtgtgactgtgggtctgtgtgtgtgtgtgtgcatgtgtgagaacgtgtatgagaagaggcatggtgcagggtttaaggtttatatactgaaagaaagttctcatttcaggcgacatctgtgccctctgctattagaatttcagcggactccacaaaatcagcaaagaaatagtgtgctgtcaatcaataccctttttgtccactagaggtcgcctgtctactttgagcagaggaaactaatctatatttttacatttagttgctgggagtttgcagacacttccagagatgtgggaggtaggagtgtggggatgagaggtggagacgtgtgtgtgtgtgtgtgtgtgtgtgtgtgcgcgtgtgtgtagtttagctattgcctttactcacctcagctgtacatagagcagcgatcctcaaacttactagtctcaagactctttcattctttcttttttagacagggtcttgccctgttgcccaggctggagtgcagtggcctgctcatggctcactgcagccttgaactcctgggctcaagcgatcctcccatttcagcctcccaagtagctgggaccacaggcatgcaccactatgtctagctaatttttaaaatatttagaagagatggggggtcttgctatgttgccaggctggtcttgaactcctagactgaagccatccacctgtatcggcctcccaaagtgctgggattgcaggtgtgagccaccacacctgggtgagatgaatactattataaaagagcaagttcagcccccttttgcctctttgcctttctgctctctgctatgtaaagataaagcattcctgctctgtggagcaggaattcaaggaggtatcttggcttcagaatcacccaacctgccagtaccttgacattggacttcccagcctctagaaccatgagctaataaatttctctttataaattcaaggaggtatcttggcttcagaatcacccaacctgccagtaccttgacattggacttcccagcctctagaaccatgagctaataaatttctctttataaattacccaggctgtggtgttattttattttttatttttatttatttatttatttatttttgagacagagtctcactcttgttgcccaggctggagtgcagtggcgcaatctcagctcattgcagcctgagcctcccgggttcaagcgattctcctgcctcagcctcccgagaagctgggattgtaggcacccgccaccatgcctggctaatttttgtttgtatttttagtaggtacggggtttcaccatgttggccaggctggtctcaaactcctgaccttaggtgatccacctgccttggcttcccagtttcccaaagtgttgggattacaggtgtgagccactgcacccagcctgtagtatttttttggggggatgaagttttgctcttgtcacccaggctggaatgcaatggcatgatttcggctcactgcaacctccgtctcctgggttcaaatgattctcctgcctcagcctccctagtagttgagattagaggtgcccgccaccacgtccggctaatttttatatttttagtagagacagggtttcatcatgttggccaggctggtctcgaactcctgactttacgtgatccacccgcctcagcctcccacagtgcttggattacagttgtgagccactgcgcccggcctgtggtattattttatagcagcgctgaatggatggagacagtggttggtcctaatcctcaatgtgatgatattgggaggtgtggccttttggaattagtgcctttttttgttgttttttgttttttgagtctatcgccgaggctggagtgcagtggcacgatctccgctaactgcagcctccacctcccgggttcaagcaattctcatgaaaccccgtctctactaaaaatacaaaaaaaaaaaaaattagccaggcttggtggtgggcacctgtaatcccagccacttgggaggctgaggtaggataatcacttgaacctgggaggaggagtttgcagtgagctgagatcacgtcactgcactccagcctgggccgtagagctaaactcagtctaaaaacaaacaaacaaacaacaccaaatgtacccatgaagtgagtttaacaggcaaataagtttccttgggagactgaggtcccttaaaggggggacagcaatatgtgacaagtgtgtccctattctaaagaggactgttaaatcatctggaggccaggcgaggtggctcatgcctgtaatttcagcactttgggaggccgaggtgggtggatcacttgaggtcaggagtttgagaccagcctggccaacatggtgaaaccctgtctttactaaaaatacaaaaattagctgggcgtggtgacaggtgtctgtaatctcagctactcaggagtctgaggcaggacaattgcttgaacctagaaggcagaggttgcagtgagctgagattttgccactgtactccatcatgggtgacagagtgagactgtgtctttaaaaaataatgaaaaagctgggcgcggtggctcactcgtgtaatcccagcactttgggaggccgaggtgggcatgtcaagaggtcaggagtttaagaccagcctggccaacatggcaaaaccccgtttctactaaaaatacttaaattagctgagcatggtggcgggcacctgtaatcccagctactccggaggctgaggcaggggaattgcttgaacctgggaggcagatgttgcagtgagccgagataacgccattgcaccccagcctgggtagcaaaagcaaaactccatctcaaaaaaaaaaaaaaaaagataaaataaataatctggatatgacttcctcaaagctctggccttaaaatattttttgacctttagccaacttctcaaatatatatatgtgtatatatatatacacacacacacacacacgcacacacatatatatacacacacacatatacatatatatataaatttatatagccagcctatataaatattatcaagatttctttgggctgcatgttgtggctcatgcctgtaatcccagcactttgggaggtggaagtgggaggatggcttgagcctaggagtttgagaccagtgtggccaacatagtaagaccccatgtctacttcttttaacaaaatataaattttgttaataaagaatatttctggccaggtgtggtggctcatgcctgtaatcccagcactttgggaggctgaggtgggcatatcacctgaggtcaggagttcgagaccagcctggccaacatggcgaaaccccgtctctactaaaaatacaaaaattacctgggcgtggtggcaggcgcctgtaatcccagctccttgggaggctgaggtaggagaatcagttgaacctgggaggcagaggttgcagtgggctgagatcgcaccactgcactccagcctgggaaacagagtgagactccatctcaaaaaaaaaaaaaaaaaaaaatttgtttgggaagggttgtaggaatgctgcccatgatgatgatgagataggtgcttctccccatctcaagccaagtgagagaaagttctagaaaacccggcatgttttccctggagtttggaggacatgatgacaccgttgtagagctccagtaatttttttttttttttttttttttaatgaagtctcaccctgtcgcccaggctggagtgcaatggcatgattttggctcactgcaacctctgcctcccgggttcaagcacttcttctgcctcagcctcccgagtagctgggattacagttgcctgccaccacgcctagctaattttttgtatttttagtagagatggggtttctccatgttggtcaggcaggcctggaattcccgacctcaggtaatccgcccacctgggcctcccaaagtgctgggattacaggcatgagccactgcacccggtcctgcttttttattaaaaggaagctgtctctgaagtgtcatacaagtaaagggtctcataagtctccaaaggttcagaaattgtggttgtgctccatgaacacaactttcaatgagaagcctattattcagattgtccatctgtcatggtaatttgttgccctggtcctaaagttgtgattgaaattgaatttttcctttaaggctgtactgggcatttgtgactttcagttgccctggcaacagcacatcctccccacactgaataatactgatggtataaaaaacacatgcagccaggtgcggtgcatcatgggtggacatggggaaaccccatctctactagaaatacaagaaattagccaggcgtggtggcatgtgcctgtagtcccagctactcaggaggctgaggcaggagaatcacttgaacccaggaggcagaggctgcagtgagctgagatggcaccactgtactccagcctgggcgacagagcaagactctgtgtcaaaaaaaccccaaaaacaaaaaacatgcaaataaagtaaaaagtgataggtgggacggccacctgtcagctgttgagctctactgtgggagaaggtctggggaaggattgggaggggtgtacgccatgaagggtgaggctgggagtgttacacgtgttatgcacagtagcaggtattggttagaatgagataagctgctgtaacaaatagacccccctgctgcccagccaacaatggcttaaaaaagagagtttatggctgggcaaggtggttcatgcctgtaatcccagcactttgaaaggctgaggtgggagggatagcatgaggccagtaatttgaaaccagcctaggcaacatagcaagaccctgtctctataagagaaaaatttttaaaaattaggtgggcttggtgatgtgtgtctacagtctcagtattggggcttagcctgggagggttcttgactttgcccatgtaagaattcaagggtgagccagtggtgttatttttttttctttttccttttttgagacagagtgttgctctgtcacccaggctggagtgcagtggcatgatctcagctcactgcaacctccacttcccggtttcaagtgattcttgtgcctcagcctcccaagtagctgggattacaggcatgtgtcaccgtgcccggctaatgttttgtggaggtgaagtttcaccatgttgctggctggtcttgaattcctggcttcaagtgatccacccacctcgggctcccaagatgctgggattacatgcatgagtcaccgtgtctggctcagtggtgttaaatagcaacttttactgaagcctcagtgcacagctgcagcagaggaattgccccttgcagagcggggctaccccacaggcagtgtgcccagaagagcagcccagaggcagcactgctgtcatatttatacccacttttaattatatgcaaatcaaggggcagtttatgcaaaaatttctaggatgagggtggtaatttccagtcaccgggtcattgccatggaaagtggtgctaaggtccgagtgttgccatggcaatggtaaactgatacggtacactggtgggtgtgtcttatggaaaactgcttttgccctagacctgtttcagccagtcctcagtttggtcctgtgtacaagccctgcctcctacctcagtagggtagggcactgggcagaactgtgtgactcccattccaggccccagctcctggaggacatttcgaacacaccgtgagggggaagggaagctgctgtgttgaaggtaaggacccagtcctggcaggttcatcacctgctgactaaagagcccttgggccctgaataatcagcagcggtggccaggccaggtggttcacgctgtgggccttaggtgagactcaaacgtgatggcttcaggtggaacctggcacattcccggctgtggtggctacatgggagagactccttctgcttgagaaagcagagaggccaggcgtggtggctcatgcctgtaatcccagcactttctgatcaagtggatcacctgaggtcaggagttcgagaccagcctggccaacatggtgaaaccctgtctccactaaaaatataaaaattagctgggcgtggtgggggtcggggggggcgcatgtaattccagttactcgggaggctgaggcaggagaatcgctcgaacctgggaggcagaggctgcaatgagtccagttcacgccattgcactccagcctggatgacagagtaagacactgtctcggaaaaaaaaaaaaaaaaaaagcaaagggaagtctgggcgtgatgtctcatgtctgtaatcccagcactttgggaggctgaggtgggtggatcatctgaggtcaggaattcaggaccagcctggccaacatggcgaaaccccatctctactaaaaatacaaaaattagccaggtgtggtggtgcatgcctacaatcccagctacttgggaggctgaggcaggagaatcgtttgaatccgggaagcagaggttgcagtgagctgagattgcgccactgcactccagcctgggcaacagagcaagacaatgtctcaaaaaaaaaaaaaggaaagcaaagtgaagagtaaatgcaacttcgtcttgcagcttagctgccagcttggccacagaggggtagagccccaagtgcactcttggggtccccgattccaggccatggctcttggacagcatttttggacctgccctgggccagagggaagtccacagccttgaagggagagttctaggcctggcaggattcactgcaagctgaccgaagagcgcttgggcctggagtgaacatcagtggtggccaggcagtacttgccgtgggcctggggtggtggccacagggagagacttcttggcttgtgggaaggagagagaagagtgggaaggactttgtcttgtggcttgggtagcccctcagctatagtagaatagagcgcccagtagattcctaaggtttccaactctgggttcaagctcctgcatggcatctctggacccacccagggccggggggacctcgccatcctgaagaaatgaacacaagtctgctggcttcaccacctactggctgtagaacgctcgagcctagagtgaacataggtggtttccaggctctgggtacagcgggccttgggtgagacccagggctgtgctggcttcaggtctgacccagtgcagtcccagaggtggtggccacagaggagcttgtgtcacccctcccccaactccaggcatctcagcacagagagactctggaaaaagtaagggaagagaacaagagtctctgcctagtaatccagagaattattattcttcttttatgaaacagactcttgctctgacacccaggctggagtgcagttgcgtgatctctgctcactgcaacctctgcctcccagattcaagtgattctcctgcctcagcctcccaagtagctgggattacaggcgcccaccacaatgcctggctaattttttgtagttttagtagagatggggtttcactatgttggccaggctggtctcaaactcctgacctcaggtgatccacccatctcggcctcccaaagcactgggattacaggcatgagccaccatgcctggcttacatatcttaactttttccttacagtttccctctctctgtcccttacaggtgcttctggaatagtattttcatctcgtccacttttttttttttttttttgagacggagtctcgctctgtcgcccaggctagagtgcagttgcgcgatcttggctcactgcgagttccacctcctgggttcacgccattctcctgcctcagcctcccaagtagctggaactacaggcgcccactaccacgcccaggtaattttttgtatttttagtagagacaaggtttcaccatgttagccaggatgatctccatctcctaacctcgtgatccgcctgtctcggcctcccaaagtgttgggattacaggcgtgagccaccgcgccaggctgaagtgcagtggtgtgaacatagctcactgcagcctcgatctcctggactcaagcaatcctcccacctcagcctccccagtagttggtactacaggtgtgcaccaccacatccagctaattttttgatttttttatagagatgggctttcgctgtgttgcccaggctaattttgagctcctgggctcaagcgatcttcccgtgtcagcctcctaaagtgctgggattacaggcctgaaccaccaagcctggcctcatttattcatttttaaagccctgtctattctgccctctgatacaccatccaacacataattatttcaataattgagtttttcatatccctcatctcccgttagcttctgcttcataacctcctcttctcgcttcgacttgccattatcctccgtcatttctctgaggatgtttgttatgtgtagtttacatgccttattagctctacttcattgggaatagtttcttccaagcccaactgagatatttgggcctcctgggtatgctggcaattatatgcctcagaaaaggtaacaattcactgcttcttaagactatggtagtttatggccaggcgcagcagctcacgcctgtaatcccaacacttaggaaggccaaggcgggcagattgcttgagcccaggagttcaagaccagactgggcagcatggtgaaatctagtctctaccaataacaaccaaacacgcaaaaaatccaaaaaacaaaactgataattttgagggttttttttttttgagcattgatttagaggtgaagtagagaaaccaatttgttttcttttttcttttttttttttgagacacggtctagctgtgtcactcaggctggagtgcagtggtgcagtctcggctcactgcaacctctggctcctgggttcaggcaattctcctgtctcagtctcctgagtagctgggactacaggctcgtgccaccacgcctggctaatttttgtatttttagtagagacggggtttcaccgtgttgcccagggtggtctcgaactgctgtcctcaagtgatctgcctgccttggtctcccaaagtgctgggattacaggcatgagccaccgggcctagccctctcctctcggttttctctggcaccatggaacctacttggaccccaggtgcaccccaaaagtgtggggatgtgtaatgtcttcctttgtaacgcccctgggaagctcttccctaaaggccaggcgagtttgctgcatcaatgccccagccacttcctccttcatttttattttatttatttttaaattgcctttataataatggcaaaagctggctggatgcagtggctcacgcctataatcccagcactttgggaggccgaggcaggtggatcacctgaggtcaggagtttgagaccagcctggccaacatggtgaaaccccatctctactaaaaacacaaaaaattagccaggtgtggtggctcagggctgaatcccagccactcaggaggctgaggcaggagaatcgcttgaacctgggaggcggaagttgcagtgagctgagattgtgccactgcactccagcctgggcaacaagagcgaaacttcatctcaagaaaaaaatgcaaaagcttttcattttgatgaagtccaattggccagcctacatttaaaaaaaaatttgaattttcattttttttattttttagagacatggtctcactctaacccaggctggagtgcagtggtgtgatcatagctcactgtagcctccatctcctgagctcaagagatcttcctctttttttttttttttttttttttgagacagagtcttgctctgtcaccaggccagagtgcagtggcatgatcttggctcgtggcccactgcaacctctgcctccctggttcaagcgattttcttgccttagcctctcgagtagctgggactacaggcgtgcaccaccatgcccagctctttttttcatttttagtagagacggggtttcaccatgttggccaggacggggtttcaccatgttggccaggatggtatcgatttcctgacctcgtgatcctcctaccttggcctcccaaagtgttgggattacaggtgtgagccaccgccctggcctctgtttttttgagacagagtcttgttctgtcacccagactggagtgcggtggtgagatctcggctctgcagcctctgtctcccaggttcaagcaatcctcctgcctcagccttgtgagtagctgggattacaggtgtgtgccaccaggctcggctgatttctttgtattagtagtagagacagggtttcacggtgttggccaggctggtcttgaactcctgacctcaagggatctacctgcctcggcctcccaaagtgctgggattacaggtgtgagccaccgtgcccggctcatgatcctccttcctcagcctcccgaatagctggaactacaggcacaagccccatgtctggctaatgaaaaacaaattttttttgagagatgggatctcactatgttgcccagactgatcatgaactcctggcctcaggcattcctcctatcttggcctcccaaagtgctgggatcacaggcttgagccaccacgccggcccactcctcatccttcagtgggaagattcggaggtattttctgcttggtttctcagagcatccccagccgtattgagccccggtttcccccagctgtgacgcactgatcagcacgcgcttattggcttttctctcatttctttcttatttttttttttttgagatggagtcttactctgtcgcccaggctggagtgcagtggtgtgttcttgggtcagtgcaacttccgcctcccgggtttaagagattctcctgcctcagcctcccaagtagctgggattacaggcgcccgccagcatacttggctaattgttgtatttttagtagagacagggtttcaccatgttggtcaggctggtctcgagctcctggcctcaggtgatctgcctgccttggcctcccaaagtgctgggattacaggtgtgagccactgcgcctggccttgtttctgacttggttctctaactcactcctgcttcctgggatcacctcccaaataaactgccatcacccaagtcattgtctcagaatctgcgtttggggaacccaagcaaatctgccactcttctgtagatgttgatgtagtttcatatgtatttctttgcccacaagaccttgttaccttcttggagggcttattaaaatggagaaaattgccaggtgcaatggctcatgactgtaatcctagcactttgggaggctcagacaggcggatcacttgcggtcaggaattctagaccaccctgggcaacatggcaaaaccctgtctctactaaaaatacaaaaattagccaggcatggtggcacacgcctgtaaacccagctactcgggaggctgaggcaggagagtcgtttgaatccgggaggtggaggctgcagtgagccgagattgcaccactgcactccagcctgggtgacagagcaagactctgtctagaaaaaaaaaaaaagaatacaaattgcttatttccaagaaaacatctctgccgtgctttcagattttcagctgattacaaatcacgcacccatgatcaaatccaacaagagatagaccccctgccataaaggaagaaggctggctgggtgtagtggcttatgactgcaatcccagtgctttgggaggctgaggcaggaggatctccgaggccagcagttcaagaccagcttgagcaatatagcgagacaccccctcatctctccaataataataaaaaaaatcagccaggcatggtggcgcgtgcctgtagtccaatctactcgggaggctgaagtgggaagattgctccaggagttcgagtctgcagttggctgagatctcgccactgcactccagccagggcggtagagccaaaccttgtctcaataaaatctccacaagggggcgccatctacatgatgatagcaggaagggaaccggccagtgtctcctggtgacgtactcattcagcgcttcttataccttaaaggtgaccaggaatcacctgggggtcttgttaaaatgcaggttctaattcagcagggctggagcaggaccacagctcttgcatttccctccctccttccttccttcctccctccctccctcccttcctccctccctccctcccttccttctctttcttctttctttccttctctctctctctctctttttttttttttgacagagtctcgctctgtcacccaagctggagtgcagtggtgtgatctcggctcactgcagccttcacctcctgggttcaagcagttctcctgcctcagccttccgagtagatggtgtcaggcctctgagcccaagctaagccatcatatcccctgtgatctgcacgtatacatccagatggcctgaagtaactgaataatcacaaaaggagtgaaaatggcctgttcctgccttaactgatgacattccaccacaaaagaagtgaaaatggccagtccctgccttaactgatgacattacctcgtgaaattccttctcctggctcatcctggctcaaaagctccaccactgagcaccttgtgaccccccacccctgccagccagagaacaaccccctctgactgtaattttcctttacctacccaaatcctataaaacagctccaccccatctcccttcgctgactccctttttggactcagccctcctgcacccaggtgattaaaagctttattgctcacacaaagcctgtttggtggtgtcttcacacggacgcgagtgaaagatgggatcacaggcccccaccaccacgcccaggtaattttttgtatttttagtagagacagggtttcactatgttggtcaggctggtctcgaactcctggcctcaggcagtctacctgccttggcctcccaaagtgctggattacaggcgtgagccactgcgccccgccaagatcttgcatttctaacatgtccaggaagcttgatgatgcggatcgagaaaacacactttggtagcgagggggctatggccttaaagttgggtaactgaaggggactccccacctggacccgtttgccctgttcctcaagccagctcaggttagcatcttcattattttattatttgtattttttttgagacagagtcttgttttgtcactcaggctgcagtacagtggtgcaatctctgctcactgcagcctccacctcccgggttgaagtgattctcctgcctcagcttcctaaatagctgggattacaggcacccgccaccactcccagctaatttttgtatttttagtaaagatggagtttagccatgttggccaggctggtcttgaactcctgacctcaagtgatctccccacctcagcctcccaaagtgttgagattacaagcatgtgccaccatgcccatctaattttttttttttttttttttttttttttttttttgagacggagtcttgctctgttgcccaggctagagtgcagaggtgcgatcttagctcactgcaagttctgcctcccaggttcatgccattctcctgcctcagcctcccgagtagctgggactacaggcacccgccaccatgcccggctaatttttttgtatttttagtagagatggggtttcaccatatgagccgggatggtctcgatctcctgacctcgtgatctgcccgcctcagcctcccaaagtgctgggattaaggtgtgagccactgtgcccggccaatttttgtatttttaatcaagacagggtttcgccatgttggccaggctggtctcaaactcaaggcctcgagcaatcctcctacctcggccttcaaagtgctgagattataggtgtgagtccctgcatctggttctaactgtatttttgtacccattaacccatttttctttatgtctccctcccaccttcccttctcagcctcaggtaagcaacattcgactcgaatcacactcttaaacacttacaactttagaattagagaattctagaattttcagtgtaataatatcagcttccattctgtatttttttttttttttagttgttttagagacacagtcttactctgttgcccaggctggagtgcagtggcacaatcacagctcactgcagctggtcggataactcctgggctcaagtgattcttccacctcggcctcctgagtagctgggactacaggtgtgtgctactgtgcctggctaatttaaaacaattttttttttgagacggagtcttgctctgttgcccaggttggagtgcagcggtgcaatctcggctcactgcaagctccgcctcctggattcatgccattctcctgcctcagcctcccgagtagctgggaccacaggcgcccaccaccacgcccggctaattttttgtatttttagtagagacggggtttcaccgcgttagtcaggatggtctcgatcttctgacctcatgatccgcccacctcggcctcccaaagtgttgggattataggcgtgagccaccgcgcctggccaaaaacaatttttttctgtagaaatggggtcatgctatgttggcctggctggtctcgaactcctgagctcagtgatcctcccacctcagcctcccaaagtgctgggattacaggtatgaaccaccacgcctggcctccattctgcattctgtgagcttgcacgtctcatctccacctactttgttggttatgaaggcttagaagagcccctggtcctgagcaagcactatgattattactattattttaaaattattattattatttttgagatggagtttcgctctgttcgcccaggctggagtgcaatggcgacatctcggctcattgcaacctctgcctcctgggctcaagtgattcgcctgccccagcctccccagtagctgggattacaggtgcgtgacaccatgcttggctgatttgtgtattttatttatttatttattttgagacggagtcttgctctgtcgcccaggctggagtgcagtggcatgatcttgactcactgcaacctccgcctcccaggttcaagcaattctcctgcctcatcctcccgagtagctatgattataggcacatgccgccacgcttggctaatttttgtattttcagtacagatggggttttaccatgttggacaggctggtctcgaactcctgacctcgtgatctgcctgccttggcctcccaaagtgctgggattacaggcgagtgacatcatgcctggctaaattgtgtattttatttatttattttttttgagatggagtcttgctctgtcacccaggctggagtgcagtggcatggtctcagctcactgcaacctctgcctcctgggttcaagtggttctcctacctcagcctcctgagtagctgggactacaggcgtgtgtgaccacacccggctaatttctgtatttttagaagagacggggtttcactatgttggctgcgctggtctcgaactcctgatctcgtgatccgcccgcctcggcctcccaaagtcctgggattacaggcatgacccaccaggcccagccacccggccctatttttattattattgctggtgctgatgttttctgcccgcctttgagatgccctcagcttggcgcatcctccagcttcctcctgcctgtatccctcccccggtgcttattgcggcctctgggccttactcagaccccccgtggtgctagagtttctggtaagttggtcaggccagggtcggataactgcatgggcacaagcattgccgctgatgagcccaccacatcctgcctcaaaagccactgtggccacagctgaggaaccctcgtgccaagggagtggagggtggtaagtggtggtcaaccagcccagtttggctggttctgggcttcctgtggccgctggcaagctggtggctgggcacagctgcttctccttgggatgtggtagctgcagccgcctgctcagtccatccttcctgatgggggttggcattgcacggtgcgatgggtttgtgaatgcaaaataacatgtgctccatgtgccctttggtcatgatttctttctttctttctttctttctttctttctttctttctttctttctttctttctttctttttctttccttccttccttccttctttctttccttccttccttccgcctttctttctctttctttctctctctctttctttctctctttctttctctttctttttctttccctccctccctccttctctcctttccttccttccctccctcctctctctctttctctgtttctctttctctatttctccttccttccttccttccttccttccttccttccttccttccttccttcgtcttgtcttgtctttttcttttcttttcttttctttcttttttttttttgagacagagtttcactcttgttgcccaggctggagtgcagtggcgcgatctcagctcaccacaacctccgcgtcctggtttcaagcgattctcctgtctcagcctcccgagtatctgggattacaggcacgtgccaccaggcccagctaattttgtatttttagtaaagacagggtttctccatgttggtcaggctggtcgtgaactcccaacctcaggtgattctcccgcttcggcctcccaaagtgctgggattacgggtgtgagccaccgcacccggccttttttcttcccttcctttcccttccctcccctcccctcccctcccctcccctcccctcccttcccttcccctctcctctcctcccttcctcttctcttcccttcccttcaccatgttggccaggctggtctcgaactcctggcctcaggtgatccgtccgcctaggcctcccaaagtgctggaattacaggcgtgagccactgcgcccagcataaaaaaaggacttctattgatatataaaaatacagacagaagagttcaccaataataagcttaaagaatttttacagctgaatatccctgtgtaaccaacactcagatcaagaaaaagacttttcccagcatccagacccccgccttccgtttttacccctcaaaaataacttctttcctggcttataacatcgaagtctagttttgtgtgttcttgattttttttttttttttgagttggaatcttgctctgtcacccaggttggagtgaaatggcatgatctcggcttactgcaaacttcacctcccgggttcaagtgattcctgtgtctcagcctcccaagtagctgggattacagatacccgccaccatgcccgactaatttttgtagttttagtagagatggggttttgccatgtcggccaggctggtctggaactcctgacctcaggtgatctgcccacctcggcctcccaaagtgctgggattatagatgtgagcagccattcctggccttattgagatcttttacaatctgtttttttggtactaagtctttgaaatccagtatgtgtgtcattttcacggcccatgttaatatggactcactgtatttcaagcactcagtgcccagatgtggctggtggctgccgtaatgggcattgctggtctggatcttgaagaagaggatgaagggacactggcacaaaagttaccaacacaggccaggcgcagtggctcatgcctgtaatcccagcactttggaaggccgaggcaggtgggtcatctgaggtcgggagtttgagaccagtctgaccaacatggagaaaccccatctctactaaaaatacaaaattaacctagcgtggtggcacatgcctataatcctagctactcgggaggctaaggcaggagaatagcttgaacccgggaggcggaggttgtggtgagccgagattacaccattgcactctagcctgggcaacaagagcgacactccatctcaaaaaaaaaaaaaagttaccaacataaaaaatggtgtgtacacactctgtcctgcaatttcatttctagagagtcatctaccataaatacttgtacatgcatacgagaatatatatacaaaggtgctcattatattataacccaaaatattggaaaccacctaaaatttcaccattagggaggtgattgagtaagcaaatttaaaactaacaacagacttcttcttcttttccttcttcttttttttttttcttttgagacggtgtctcgctctgtcgcccaagctggagtgcaatggcgcggtctcggctcacttcaacctccacctcctggttcacacgattttcctgcctcagcctcccaagcagctgggattacaggcgtgtgccaccacgcctggctaatttttgtatttttagtagagacagggtttcaccatgttggccaggctggtctcgaactgctgacctcgtgatccacctgcctcggcctcccaaagtgctgggattacaggcgtgagccaccgcatccggccttcttcttcttcttttcttttttgagacagggtctcgctctgtcacccaggctgggtgatcatagacagtggtgcgatcatagctcactgcagcctcaatctcccaggctcaggtgatcctcccacctcagtctccagagtagccgggaccacaagtgtgcaccactacacttggctaatttttgtattttttgtagacatggggtttcttcatgttgcccaggctggtcttgaactcctggcctcaagcaatcctccctccttggcctctcaaagtgctgggattacaggcgtgatccactgcacccagctaaaggatttcttatgctgttaaaacagaacaaagtgttttaaaatgtatttacaaaaacatcattctgacgccaggtgcagtggctcttgcctgcaatcccaacactttgggaggctgaggtgagaggattacttgagcccaggagttcgagacaagcctgggcaacatagtgagacccccgactctacaaaaaataataaaaccaaaatgaaaaccaaaacgttatccagaaaaacaaagtgataaagtacattactggggcccagcatggtggctcacacctgtaatcctagcactttgggaggtcgaggtgggaggatcacctgaggtcaggagttcgagaccagcctggccgacatggcgaaaccccatctctactaaaaatacaaaaatttggtggctcatgcctgtaatcccagcacttcgggaggccaaggcgggcggatcacgaggtcaggagatcaagaccgtcctggctaacacggtgaaaccctgtctctactaaaaaaaaaaaaatacaaaatattagctgggcatggtggcgggcgcctgtagtcccagttactcgggaggctgaggcaggagaatggcgtgaacctgggaggcggagcttgcagtgagccgagatcacgccactgtactccagcctgggcaacagagtgagactccatctcaaaaaaaaaaaaaaaaaattagccgggcgtggtggctgggcgcctataatccaagctacttgggagactgaggcaggagaatctcttgaacttgagtggcggaggttgcagtgagccgagattgtgccactggactccagcctgggcgacaaattgagactctgtctcagaaaaaaaaaaaaaagttattggaacaactggtgaaatttcagtgagggctgagtatagtgtggtatcagtggcatatttccttattttgataaatatattgtggttatgtcagagaatatcctgtcataaccgcaatataagagatacacagtaacaaatttatggtaaaggagcatgatgtttccaaagtactctcaaatgattccaggaaaaacataagtagacatagatatatacgcctgtattatttttctagggtttaccagcccccacaattgcatgagccaatttctttttttctgtgtgtgtgtgacaaagtttcgcccttgtcactcaaggctggagtgcaatggcacgatctcggctgactgcaacctccacctcccgagttcaagtgattcttctccctcagcctcccaagtagctgggattacaggtgcccaccaccacacctggctaattttttgtattcttagtagagatggggtttcaccatgttggccaggctggtcttgaactcctgactttcaggtgatccacccgccttagcctcccaaagtgctgggattacaggcgtcagccaccgtgcccggcctctgtctttttttttttttttttttcgagacagggtcttgctcttttgtccaggttgcagtgcagtggcacaatcataggtcactgcagcctcgacctcctgggctcaggtgatcctcctgcctctgcctcctaagtagctaggactataggtgtgctccaccacacctggataattttttgtgttttgtagagatgggggtttcactatgttacttaggctggtctggaactcctggactccagtgatcttcccaccatggcctcccaaaatgctaggattacaggcatgagccattgcttctggccccaattgctttctttttctttctttctttttttttttttttgaggcagagtctcactttgtcgcccaggctggagtgcagtggtatgatctcggttcactgcaacctcttcctcctgagttcaagtgattctcctgcctcagcctcccaagtagctgggactacaggtgcctgccaccattcccagctacttttttgtatttttattaaagacggggtttcacaatgttggtcagcctggtctcgaactctttacctcaagtgatcttccctcctcggcttcccaaagtgctgggattacaggcgggagccaacgcacccggccgcttttactattcttgcaacttttttcatttgacattccatcgaaataaaaagttaaaaaaattctttttcttctgagggggtgttttatcaaggacacctttatcaagggtcccgggcctaaaaatgttaagaacccatgatttacggctgaggaggcaacttccatccaaaatcctaaaagtcaagttcctgtgacctggcttcctgaacctccccgctcctgcgccccctggaggtcagggctagaacaacacggcattcctataatgctccaaatcgccacaaatcgaccttggaaatcctgggtgagtaacgcagactgcgcacatggcttcaattagcggaactaaaacttgctgaacatcgtgtacccgcgtgtccatggccaaacacaaactccacctttgtaaaagtctaggtgaattcccagctgaattcagaagcgtgacaggaatgggacttttcattggtgtctttttcttttttctatttttagagtggggaggagtgtatttctggattgtttaaatatttacaatgagcatgcatttcctttgcaattaaaagaaaaccagatttttttttttttttttttgaggcagaatgttgctctgtccccaggctggagtgcagtggcgcgatctcggctcactgcaacctctgcctcccgtgttcaagcaattctcctgcctcagcctcctgagtagctgggactacaagtgcccgccaccacgcccagctaatttttgtatttttagtagagacggggtttcaccatgttagccaggatagtctcaatctcttgaactggtgatctgcctgcctcggcttcccaaagtgctgggattacaggcatgaggaccgcacccggccgaaaaccagatttttaaaaattgaagtttgctgtagaaaaatactgtgggagaaagttgtgggtggtgttttgtagagtcgcagaaggacatgggaaaaaaaaattgagtgtgtttctgtaatcatcataacaatcacactcattgtgccgtaggctccaagggagggctctgagctgtggttaccagataaaatacaagattctcaggtaaaatgtgaaaaaaaaaatatttttgtgatcttaactcactgcagtcttgatctcctgggctgaagtgatcctcctgcctcagcctcccaggtagctgggaccacaggcacgtgccaccatgcccagctaatttttaatttattttgttgagatgggatctcactatgttgcccaggctgctctcaaactcctggcctcaagcgatctttcctcggtgtccccatgccctgggattacaggtatgaagcaccaggcccaaccctgaaatttaaagttaactgggcagtctgtaatgtgtttttgtttgtgtaggtgtgtgtgctaaatcaggcaaccccctattctgagcagaggagtgctttgatctgacttagattttaataggctccctctggttgctggtggagatgagactacggagggggggcagtgaagatcccagagaggaggctgctgtaatggtccaagcagaaggtgatagtgatttggatcagggtaacagagccgaggtggtgagaggttgacaggtcatgcatctatttcgaaggaaaggccatgtccaggctccttagctcggcattcaaggcttctctccaccactggacacacttactctctagcttctcagaccctgttgcagatagaatcatgatccccaatgatgtccacatcttaatcccctgaacctgtgaacaggtgaccttccatggcaaaagggactttgcagataggatgaagttaaagatctttagatgggggagcgattatcctggattgggtctgggtgggctcagtggaatcacaagagtccttatatgaggaagatagaaatttgagacatacggtagaggaggaggtgatgagaccacagaggcagggacgggcgtggtgcaaccacaagccaaggaatttcaggagccacctgaaggtgggagaggcaaggaacagattctcccctggaacctctggagggagtggtgacatcttgattttggacttctggcctgcagaaccatgccaaaataattgtctggctttttttttctttttttttccttgaggtggagtcttgctttgtcgcccaggctggagtgcagtggtgccatcttggctcactgcaacctccacctcccgggttcaagtaattcttgtgcctcagcctcccgagtagctgggactacaggcatgcaccaccacacccaggtaatttatgtatttttagtagagatggggttttgccatgttggccaggctggtcttgaactcttgacctcaatgatctgcccgcctcagcctcccaaagtgctgggattgcaggcatgagccactgcgcccggtcctggtgttaagcccgcagtttgtgctaattggttacagcagcctcgggaaggtaatctaggctccttccttgccccaggctctaggaagtatcttagcccccagccctgggctgcagacctgtaccagtccatggcctgctaggaaccatgcagcatcgcaggaggtgagtggcaggtgagtaagtgaagcttcatctgtatttatagccacgccccttcgctcatattaccgcctgatctgtcagatcaggggcggaattacattctcataagagcgtgaacccaggccgggcgcagtggctcaagcctgtaatcccagcattttgggaggctgaggcgggtggatcacgaggtcaggagttcgagatcagcctggccaagatggtgaaaccacgtctctactaaaaatacaaaaattagccgggtgcagtggtaggcacctgtagtcccagctactcgggaggctgaggcaggagaatcgcttgaacctgggaggcggaggttgcagtgtgccgagatcgtgccactgcactctagcctgggtgagagagtgagactccatctcaaaaaaaaaaaaaaaaaaaaaaagagcatgaaccctgttgtgaacagcgcatgtgagggatctgggttgcaagctccttatgagaatctaatgcctgatgatctgtcactgtatcccatcacccccagataggaccatctcgttacaggaaaacaagctcagggattccactgattctacattatgttgaattgtataattatttcattatatattacaatgtaacaataatagatggagatggttgtggcttgtgtagttgggggacagggtagctccattttctattgccaactttataaccctagaaggatgatttttttcttttcttttctttttcttttcttttttttttttttgagattgagtcttggtgttgtcagcctgggctggagtgcaatggtgcaatctctgctcactgcaacctccgcctcctgggttccagcaattctcctgcctcagccttctgagtagctgagattacaggcacccaccaccacgcctggctaatttttgtatttttagtagagatggggtttcaccatattggccaggctggtgacgatggttttttttttttgagacagagtcttgctttgttgcccaggctggagtgcagtggcgcaatcttggctcactgcaacctctgcctcccaggtttaagcaattctcctgcctcagcttcccaagtagctgggattacaggcacctgccaccacacctgggtaatttttgtatttttagtagagacagggtttcaccatgttggccagactcgtcttgaactcctgacctcaagtgattcatttgcctcagcctcccaaagtgctgggattataggtgtgagccattgcacctggccctagaaggaagatttaacagtaaaatatacttaaatgctgggctacctccgcagactagctcagcctctttgggtctcaaatcagcctggccgggaggctgagtggaggttacagtctctgctttcttgaatcccaagggaggggtttaagccaactgcattcctgagcttttgcccagaaggctggcgtcttaggaggaaagagatagatggctccaggccgggcgcagtggctcacacttgtaattctagcactttgggaggttgaggtgggtgattgcctgagctcaggagtttgagtccagcctggccaacatggcgaaaccccgtctttactaaaaatacaaaaaattagccgggggtggtgacacacacgtgtaatcccagctactcgggaggctgaggcaggagaagtgcttgaacccaggaggcagaggttacagagagccgagattgcaccactccactgcagcctgggcgacacagcaagactctatcaaaaaaaaaaaaaaaaaaatgagagagaagagatggccccaaatagggaaaccaaggccaggagaggggccgagcctgcacaggagcttcctcggttttccgagcgccggccccccttctctgcctgggaggaggtggttagagtcccctgggtgtgtgccccgcagagggagctctggcctcagtgcccagtgtgcagaccaatgagagccccagagagaaagacggtcatttcctccctgcatcttcccttggggctttaaaaaccacagcccttgggcaggagggaccttcgatcctcggggagcccaggagaccagaacatggtgagtctcgaaggggaatgggagcaggaaactttgtcctgggtccctcccatctttgctccagtgggtccttctctctccccaactctcgccgtcaactctgtctgtctctccctttccttctctctccctgtcttccacctcccaccttccctctctcctgcatcccaggctctcacactccagggctgggatgtggccatgggaataagattgtcaagattgtgggagcaacagcaacctcgtggggctggggcccgagaagattccccaggggaggggacccttgagttgggtctagtaaggtgactaagaattccacaagcagccgagcgcagtgggtcacacctgtgatcccagcacattggggattgtgccaaggcgggaggattgcttgaggccaggagttcaagaccagcctggccaacatagtgagaccctgtctgtatttttttttttatttaaagaattccacaagtgaagaaatctagaacaggccttccaggcagtgggaatggcagagaaaatgttgggaggctggaaagaaccagtttggaggaatggtcaagttactcagatgctcttgcagatagatgttcttttctttttcgacttggggtcttgcactgttgcccaggctggagtgcagtggcaccatcatagctcactgcagtcttgaactcttgggctcaagtgatcctccctctttagcctcctgagtatctgggaccacaggcatgcaccactatgtccggctaatttttaaaatttttattcttgtagagatgggttcttgctatgttgtcagggctggtctcaaattcctggcctcaagccatcctcccaccttggtctcccaaagctctgggattactggcatgaggccattatgcctggtcgtttgagatgttctgcatgacagagatggggaaactgaggcccaggcaggagcagagatggatggggaccctccatggttggtggcagaagcaggttatgccatggattctgtgagtgtcagaaggaatgcaccccaggctaaatgagggtccctgtcatccctgcgtctggaggcctgggcactgagccagcagagctgcgattcagcacctgctgtaacacaggcattgccttgcttcatctgtgtcaaagaggaaacggaagatggtttggatggaccagggaggggtctgatgttgcttcattcctgcattccacccttgagatccgacttgggcaaacgggactctctgattcttcttcttctttttttttttctttccaaaacattttccaaagtaccaaatgatacttggtaaaaactcattctcggccaggcgcggtggctcatgcgtgtaatcccagcactttgggagactgaggcgggcggatcacaaggtcaggagattgagaccatcctggccaacatggtgaaactccgtctctaccaaaactacaaaaattagctgggcatataagcgggcgcctgtagtcccagcacttgagaggctgaggcacgacaatcgcttgaacccatgaggcagaggttgcagtgagccgagattgctctactgcactccagcctggcaacagggccatctcaaaaaacaaacatagaaaaaaaaaaactcattctccctgcctaccccagagcctctgactccttttctttccttttattttgagacagagtttcactcttgtcgcccaggctggagtgcaatggcacgatcttggctcaccacaacctctgcctcgcggcttcaagcaattctcctgcctcagcctcccgactaggtgggattacaggcatgcgccaccacgcctggctaattttttgtctttttagtagagacggagtttcaccatgttggccaggctggtcttgaactcctgacctcacgtgatccacccacattggtctcccaaagtgctgggattacaggtatgagccaccctacctggccctctgactccttttcattgcctcctaccctacctggggcaaccatgggatgccagtttgtggtggatccttccagaaacagtttacagatgcctgagagcacagatgcttagggaacaaagtaaggactagtgtgatgcggggaaccccaaaaccgagctcagcttctgtctctactatgaaatagttgcggagatctgtcctctccgtgcttctgtctccttatctttttgttttttgagacagtgtcttgctctgttgcccaggctagagtgcagtggtgtgatctcagctcactgtaacctccacctcctgggttcaagtgattctcctgcctcagcctcccaggtagctgggactacaggtgcctgccaccatgcctggctaatttttgtatttttagtagagacggggtttcaccgtgttggccaggctggtcttgaactcctggccccaagcaatcttcccgccttggcctcccaaagtgctgggattacaggcgtgagccatcgcacccagcctccttctccttatctttaaggtgaagataatactagaatctacatcataggctagttgagagaattgactgagtgaatgcatgaaaagttcttgtagcagtgcctggtatacagttggcgctcaatgtgggtgacatttctatcctttcccagccttataaatggcagtatgttttgtacagtactctacatctggcttttttaaatgaataacatatagtattattaactagcatttattgagtgcttactgcataccaggcgttgtattaggcattcattaatttccccttaaccttgaggaaggtacttcattcccgtgtagttcaagggagttgcctcctcctcctcctcctttttttcttttttctagacagggtctactgaggtcttccacctcagcctcctgagtaggtgggactacaggtgcatgccaccacacccagctagatttaaaattttttgtagaggtggggtcttgctatgttgcccagcctggtgcttctttctttcttttatcagctgagtaatatgctagtaggaggtttcatccccttcaatggaaatttagtttgcttctaatatttggtctgttttgttttgttttgagacagagtctcgctctgtcacccagcctggagggcagtggtgcagtcttggctcactgcacctctgcctcctggattctggtgattctcctgcctcggcctcccaagtagctggtatcacaggtgcgtgccaccacacacggctaatttttgtattttattttagtagagacgggatttcaccatgttggccaggctggtctcgaactcctgacctcgtgatccacccgcctcagcctcccaaagtgctgggattataggcgtgagccaccgcgcctggcgtccagccacattctttaactcagcatctgcagaccttccagtcctatcttggccgcctgccagccatgctgacctttcgtttctgctgtgcaccacctgcccttcctctctcctttctgcctagaatgcatgcccccccactcccaatgcactttaggcctgcctggtagccactcaaacagagggctctgggctgggcgcggtggctcatgcctgtaatcccagcactttgggaggctgaggtgggtggatcacgaggtcaggagatcaagactatcctggctaacacggtgaaaccctgtctctactaaaaataaaattagccaggcatggtggcgggcacctgtagtcccagctactcgggaggctgaggctagcaaatggtgtgaatccaggaggcggagcttgcagtgagctgagatcgcgccactgcactccagcctggggacagagcgagattccgtctcataaaaaaaaaaaagagagagagggctctggggctcagctctcaggagtttctctcctgtctctgttcttgctaaccgagaagacttggagaggtctgttcatttctctgtagcctcatttttctcttctggaaaatgagtgttgctgttgcaacaagtaagtctcctagggttgctttgtgggttcaatgagataatacacgagaaaggctcaggacagcctggcaatgattatggctgttcttgtaggtactgcgccttctccttcaccctgttctcatccgatcgttcacatcttgcggccagcacccttgtctaagccaccgtcatgcctcacgtcacctggacagttccaatctccgtttcctcccagcttctgctctctgcccctttctccatgcaacagacaagggttgttcctctaatgagcatgtgaatttaggaagaataatagtaccctgccctttgtgctattgtcacatagatatgcactgtgattaggaaattactaagccaacacctgggaagcacatggaatagtgccgggcaattagaacccccagagtggccctggacctgcactgcccaatatgtgggccacgtgccacaatgcagctacctacgtttatttttcactattttattttattttactttatttattttatttttgagatggagttttgctcttgttgcccaggctggagtatagtgaagcgatctcggctcactgtagcctccacctcccgggttccagtgattcttctgcctcagcctcccagatagctgggattacaggcgcacgccaccactcctggctaatttttgtatttttagtagagacagggtttcaccatgttggtcaggctggtcttgaactgctgacctcaggtgatccacccgcctgggcctcccaaattgctggaattacaggcgtgaaccaccgtgtccagcctattttattttttagagatggagtctcgctatgttgcccaggctggagtgcagtggcacgatctcggctcactacaacctccacctcctgggttcaagtgtttttcctgcctcagtctactgagtagctggaattacaggtgcctgccatcacacccagctaatttttgtatttttagtagagacggggtttcactatgttggccagtctgggcttgaactcctgacttcaagtgatccaccttccttggcctcccaaagtgctgggattacaggcgtgagccaccacgcctggcctcaccctagatcttggaggtctttccacatcattatataaacattctttttgtctgtttttttcctttttgtagggatagggtcttgctaggttacccaggctgatcttgaactcctgggctcaagcaatccccctgcttcagcctcccaaagtgctaggattacaggcatgagccactgcacctggccaacttttccattctttttgatagctgtgtagtattctgttgcctggatgtaccatcattaatttagccagtcccctcttgctggacatgtcagttatttccagtctttggagaggtgctgcagtggcaaactttgcaagccgtttgcgtctgaagatcccggaaaccacaggacgttggaatcagcgtattttttctgcctttctgaagtcaaccagaggaaaggactgagtgagctcatggcaggaacggagctttgtcagctgatgagggagtgacaaggcgatgtcagagcagagggtggggaggctccccttacgagggtctgagtcattctgcagtcaaggattgctgggagcttgcgaaaccagcagaggcaaaatttaccttcatgcgtcacagccaaagggaacattcaaaatatttaacaatgtgctaaagtgcagaggtcccctgggcagggtctagggcctcctgctgcacctagcattaactctttagtgacatgaacatggcgacctggagtgggggtgtcccagagtaggaaacaggaacttagggtgctgggagcgggcaatagaagaagtgggtggctgagggcaggggctgtttaccagtgaaaatatttttaaaaatgttaaccttctatttggaaatattttcaaacttacggaaaaatgacaagaatggaacaggctcatatacatatacattttacctagactctccaaatttactgtatctgtctctccattatccatccatccatccatccatctgtccatcgattcatccatccatccatccatccatccatccgttatctagctattttttttttttagacagagtcttgttctgttgcccaggctggagggcagtggcgcaatcttgactcactgcaacctccacctcccaggttcaagcgattctcctgcctcagcctcccaagtagctgggactacaggcacacaccactgggcccagctaatttttttgtacttttagtggagatggggtttcactatgttggccaggctggtcttgatcttctggcctcaagtgattacaggcatgagccaccatgcccagcccattatctatgtatctatcatctatctatctatcatctatctctcaatcatatctccatgtatccattgtctgtccatcagtcatctatctgtccatcatccatgcatccactcattcacccattcgttatctatccatccgtttatttatatccatccatctttctatcacctttttttttttttgagacagagtcttgctcagtcaaggctggagtgcattggcatgatctcagcttactgcaacctccgcctcccaggttcaagtgattctcctgcctcagtctctggagtagctgggattacaggtgcgcgccaacactctggctaatttttgtatttttaatggccttttgtgactggcttctttcacttagcatcatgttttcaagattcatccacattgcagcatgtgtcagcacttccttttcatagctgagtaatattccaccacgtggctaaaccccacctttttcattcactcattagcagatactgacatcttatctttcaataatttactcatggatatgattccaccagtaaatgcccactgcccatagcctggctaaccttgggcaggtgcaatgtaagggaactagaaaaaaaaaaacaaaactatccaggcatggtggcttacatctgtaatctcagcactttgggagttcaaggcaggagggttgcttgaagttaggagtttgagaccagcctgtgcaacaaagcgagacccatctctaccaaaaaaaaaaaagaaaaaaaatacaaaaattagctgggtgtggtggtgcacaattgtagtcctagctactcaagaggctgaggcaggaggattgcttgagccagaggggctggggtgacagtgatccatgattgcaccactgcacataagcctgggtgacagatcaagaccccgtctcaaaaaaaaaaaaaaaaaaaaaatataaaacggggctgggcgtggtggttcatgcctgtaatcccagcactttgggagaccaaggccggaggattgcttgaacccaggagttcgagaccagcctgggcaatacagtgagaccctcctctttaaaaaaacattaaaaattagctgggcacagtagtatgcacctgtagtcccagctgcttgggaggctgaggcaagaggatcacttgagcctgagaagtcaaggctgcagtgagccaagatcacacccctgagctacagcctgggtgacagagtgagactcagtctcaaaaaaaaaaaaatatatatatatatatagtggttcagggatgtggatctgagctcttcaataactgacaaataataataccaatggctgccacttcttgtcctcttctctgtgtcaggcgctgtgctaggtgcttaggcatttttcatcttatttaatctttgaggtgagtgttttaaaggtagaaaaaccaggccgggtgtggtggctcatgcctgtaatcccagcattttgggaggccaaggcaggcagatcacgaggtcaggagttcgagaccagcctgaccaacatggtggaaccctgtctctactaaaaatacaaaaattagcagggtgtggtggcaggtgcctttagtcccagctactcaggaggctgaggcaggagaatcgcttgaacctgggaggcagaggttgcagtgacccgagatcgtgccactgcagtccagcgtggcgacagagtgagactccatctcaaaaaaaaaaaaaaaatgtacaaaactccatctgcaaattcaaatatttagagctgcaaatacagctctcagtatttccagaatgatttctatttcttgctgtccccttttctctgggttggtgtcaaagtggccttcaggactgggctagctccataggtcacaaaactcacctcttggaaatggtcaggggcagcctgtctggtttgcattccagcccgtatgggttcacatcctctctgagtgacctggaacagcctacttcaccttctggtgcctcgtgcttcttcatcagcgaaatgggcatttttttttctttcttttttttttttgaggtggagtctcactctgtcgcccaggctggagtgcagtgtcgctatctcagctcattgcaacttccacctcccaggttcaagtgattctcctgcctcagcctcccgagtagctgggattacaggtgcccgccaccacgcctggctaatttttgtatttttagtagagacggggtttcaccatgttggccaggctggtctcgaacccctgacctcaggtgatctgcccaccttggcttcccaaagtgcttgggttataggtgtgcaccaccacacctggcctgaaatgggcatattaacagaacctccttgtaggttgtggtcaggatggaaagagcaaattccatgccgcatgcatagtaggtgctcagtaagtactggctgctttcgggtgatcactcagtgccctgatgggtgctttactgcagtgtctggtgcctctggacacagatttcacctacaaggctttctccagtccagctgccatggactgcagcctttctttcttgggtgcatgacagcttccttcagctctgtctgggaagaagtgatcaggacctttttgttctatttttttttttttttttttttttagatggagtctcactctgttacccaggctggagtgcaatggggctgtttcggctcactgcaacctctgcctcctgggttcaagcaagtcttctgcctcagcctcccaagtagctgggattacaggcgcccactaccacgcctggctaatttttgtatttttagtagaggcggggtttcactacattggtcaggctgatcttcaactcctgacctcgtgatccacccacctcggcctcccaaagtgctggattacaggtgtgagccaccgtgcccggccagtagggctagactttgacgttaggctgctggatcgtggggaagcccaggggcttcgcaggatgggactgaggggagaggtggcagactggcaaggggtccaactagcatggaatcatttcattttttttttttttttttttttgagacagggtctcactctgtcacctaagctggagtgcaatggtatgatctcggctcactctaacctctgcctcctggggtcaggtgatcctcctacctcagcctccggagtagctgggactacaggcaagtgcaaccacgcctggctaatttttgtattttcagtagagacggggttttgccatgttgcccaggctattctcaaactcctgggctcaagcagtccgcccgcctcggcctcccaaagtgctgggatgacaggcgtgagctacggcatctgcctcaatattttaataagtggtgtgacaccctagttgactctcagccctcagcatccccatttcctagtgagaaaaagccacacaggggaaaagccacatgcctgagccaggatgccccctacccgggcacatgtctgcagactcatcctctctgctctctccgattccccttaggactccttcaattataccacccctgattatgggcactatgatgacaaggataccctggacctcaacacccctgtggataaaacttctaacacgctgcgtgttccagacatcctggccttggtcatctttgcagtcgtcttcctggtgggagtgctgggcaatgccctggtggtctgggtgacggcattcgaggccaagcggaccatcaatgccatctggttcctcaacttggcggtagccgacttcctctcctgcctggcgctgcccatcttgttcacgtccattgtacagcatcaccactggccctttggcggggccgcctgcagcatcctgccctccctcatcctgctcaacatgtacgccagcatcctgctcctggccaccatcagcgccgaccgctttctgctggtgtttaaacccatctggtgccagaacttccgaggggctggcttggcctggatcgcctgtgccgtggcttggggtttagccctgctgctgaccataccctccttcctgtaccgggtggtccgggaggagtactttccaccaaaggtgttgtgtggcgtggactacagccacgacaaacggcgggagcgagccgtggccatcgtccggctggtcctgggcttcctgtggcctctactcacgctcacgatttgttacactttcatcctgctccggacgtggagccgcagggccacgcggtccaccaagacactcaaggtggtggtggcagtggtggccagtttctttatcttctggttgccctaccaggtgacggggataatgatgtccttcctggagccatcgtcacccaccttcctgctgctgaagaagctggactccctgtgtgtctcctttgcctacatcaactgctgcatcaaccccatcatctacgtggtggccggccagggcttccagggccgactgcggaaatccctccccagcctcctccggaacgtgttgactgaagagtccgtggttagggagagcaagtcattcacgcgctccacagtggacactatggcccagaagacccaggcagtgtaggcgacagcctcatgggccactgtggcccgatgtccccttccttcccggccattctccctcttgttttcacttcacttttcgtgggatggtgttaccttagctaactaactctcctccatgttgcctgtctttcccagacttgtccctccttttccagcgggactcttctcatccttcctcatttgcaaggtgaacacttccttctagggagcaccctcccaccccccaccccccccacacacaccatctttccatcccaggcttttgaaaaacaaacagaaacccgtgtatctgggatatttccatatggcaataggtgtgaacagggaactcagaatacagacaagtagaaagattctcgcttaaaaaaaatgtatttattttatggcaagttggaaaatatgtaactggaatctcaaaagttctttgggacaaaacagaagtccatggagttatctaagctcttgtaagtgagttaatttaaaaaagaaaattaggctgagagcagtggctcacgcctgtaatcccagaactttgggaggctaaggtgggtggatcacctgaggtcaagagttccagaccaggctggccagcatggtgaaaccccgtctgtactaaaaatacaaaaaattaactgggcatggtagtgggtgcctgtaatcccagctacttgggaggctgaggtgggagaattgctcgaacttggaggtggaggttgtggtgagccatgatcgcaccactgcactctagcctgggtgaccgagggaggctctgtctcaaaagcaaagcaaaaacaaaaacaaaaacacctaaaaaacctgcagttttgtttgtactttgtttttaaattatgctttctattttgagatcattgcaaactcaacacaattgtaagtaatgatacagagggatcttgtgtacccttcacccagcctcccccaatggcaacatcttgcaaaactacaatgtagtctcataaccaggatattgacattgatacagtgaagatacaggacattctcatcaccacagggatccccaggatgcccacttccctccacccccacaccccagccgtgtccctaacccctggcaaccaggaatccactctccatttctataatgttgtcatttcaagaatgttattcaatggaatcatatagtatgtaacctgttttgagcttaaaaaaaaagtatacatgactttaatgaggaaaataaaaatgaatattgaaatgttgtgttatttctagtgaataattgactttgcagtaggtattagtcgattttcacactgctgataaagacatacccaagactgggaagaaaaaagagatttaattggacttacagttccacattgctggggaggtctcacagtcatggcaggaggcaaaggcactacttacatggtagtggcaagagaaaatgaggaagaagcaaaagtggaaactactgtgaaacccatcagatcttgtgagacttattaactatcacaagaatagcaagggaaagaccggaccccatgattcaattatctccccctgggtccctcccacaacacatgggaattctgagagatacaattcaaattgagatttgggtggggagacagccaaaccatatcacaatatttctgctttgattgtgtagtgtgcatgtgcatggattatctagaaatagcgtgcagaccagccagctgtggtggctcatgcctgtaatcccagcactttgggaggctgaggcaggcagatcacctgaggtcaggagtttgagaccagcctggccaacatggtgaaaccccgtctctactaaaaataccaaaattagctggtgtgttggtgcacacctgtaatctaagctacttaggaggctgaggcaggagaattgcttgaacccgggaggtggaggttgcagtgagccaagatcatgccactgcactccagcctagagtgagactctgtctcaaaaaaaaaaaaaaaaattaaatttagaactagtgtacagacccaatgtcgtccaacagaaatatgatgtgggccacatgtatatctttgttttctagtagccacattaaataagtaaaaagaaatagatgaaatacttaataatataatacaatcatatgttatattaagaacaatgaggcttatgtctgtaatcccagcactttgggaggccagcctgggcaacatagtgaggctccatcttcaaaaaaattagtctgagcatgggggctcatgcttgaaatcccagcactttgggaggctgagctgggcagatcacaaagccaggagttcgaaatcagcttggccaacatggcgaaaccccatctctactaaaaacacaaaaattagccggacatgatgatgcacgtctgtaatcccaggtactcaggaagctaaggcatgagaatcacttgaacccgggaggcagaggttgcagtgagctatgattgtggctcggcactctagcctgggcgacagagtgagactctctcagaaaaaaaaaaatttttttttttaacgaaaaaattagccggtgtggttggtagtgcctgtggtcccagctactcgggatgccgaggctggaggatcgcttgagcataggagtttgaggctgcagtgagttgtgatgctgcactccagcttgggtgacagagcaagaccctgtctccaaacaaacaaacaaacaaacaaaaaattgcctgagtgtctcgatggacagatgctgcagtctcttgagcttgcagaagtggctgtgagtggtgtctgtgcctgcttgagagtagacgttggtacctgggacaagatcctctctgtaacttgtgctcattagtgcagattccccaggcatcgaggtcacggggaaggacctgagccccagccgccttcagctcctgggggtgggctcccggcagctccctcctcaagaagacaacaccagcctcctggcctcctggccttctcccacctgctccggtctcttccatggctgcccctgacctggatagtttccctctgcctctttgctggacctttctccgcgtcctttgcagagttttttcctcttcgacgttggcgttcctcagctgtgtgtccacctcatttggtgcgctcactcctgcagcttcatccaatatcttcagcatctctcttccacactgggcctccccacccccttgccacagccagactgacctcagcagtctccccggaacctcttcctccccttccctcccgactccagagacaaccccgcggtgcacccagtcacccaggcctgagcctggggcccatcctggatgctacctccttcccgccccacgccctgcctggcccatgccctccatcctctcccatttggctctctgccttgccccttccctgatttcctggctgtccagtctgtttttcccagaccatccctgcctctattctgccttccttcaggggttacctcctccaggaatacctccctgacttcctcctctgcctccccaacccctacattctatctctattcccagtcatcctgtagctttcctggcttcgggagttgcaggcagtgggtattttctacccaccctgatttgggaaggagatagtgtcccaaaagctgggaggccaaagagtaggagtcggaggccaaggagtgggatccaggtagtctttccaaggcagcccccatctggtgttgacctgctctgcccagtatggaagtgggctgaaggggcagacaattgccaaatctgtagcttggagaatctgctgggtcaacaagttccgaaggggaagtggtagggaagggaagtggatgatgggcttggctgagtcaggctgtgtgccctttccggcacccacccccactccctgcagccctgggatcttattcacgcatctactctgcagaccgggatgcctctaagtcctggagccaaagccttctcctctttatctgtgccacgtgaccgtcctgaaccccacacctctcagagccaggaaggcatttctctagatgagcacagtcccatagaaatagactgtgagtggccgggcgcggtggctcacacctgtaatcccagggctttgggaggccgaggtgggtggatcacctgaggtcaggagttcgagaccagcctggccaacatggcaaaacctcgtctctactaaaaatacaaaaactagccaggtgtggtggcgcatgactgtagtctcagctactcgggaggctgaggcaggggaattacttgaacccgggaggcgggagttgcggcgagctgggatcgtaccactgcactccagcctgggtgacagagcaagactctgtctctaaataaataaataaataaaataaaataaaagagaaagtaatagactgtgagccaggaggcaggaggatcgcttgagcccaggagtttaagaccagcctgggcaacatagggagaccctgtctctacaaaaattaaaaacaaacaaatgaaataactgggtgtgcaggtatgcacctgtagtcccagttactcaggaggctcaggtgggagaattgtttgagctcaggagagactgaggctgtagtgagccaagatcgcaccactgcactccagcctcggtgacagagtaagaccctgtctcaaaaaaaaaaaaaaaaagaaatagaatgatatttatattttcccacaggcaagcaacagacaaaaagaaacaaaaagaatcaggtaaaattaattttgataatacattttatttaacacaatatatttaaggagtatcattttaacatgtgttcaatagaaacaaattcttgagacttcatattctgttttttttggtactgtgttttcaaaatctggtgtgtattttccactcacagcacttcttatctcggacccgaagacatttcaagtggtccgtagtctcttgtggctggtggctgcagtgttggactgctcagggccagacttccttgactaatgtatagagcatctacagaatttgaacatctaactgttggagccgtgcttctaaccctccgaggttctggtgtgatattctaggatcctgtgattcaaatagcctgtaactcacattgtaggatctattaggttcaatagtctatgattccaacattttaagagtctgtgattccaatattctagtctccagagtctttgattgattgattgattttgagacagagtcttgctctgtcacccaggctgtagtgcagtggtgcgatcttggcttactgcaacctctgcctcccaggttcaagcgattctcctgcctcagccatccgagtagctgggattacaggcacctgccatcatgcctggctaatttttttttttttttttgagacagagttttgctcttgtcacccagctggagtgcaatggcacagtctcggctcactgcaacctccgcctcccgggttcaagtgattctcctgcctcagcctcctgagtagctgggattacaggtgaccgccccacgcccagctaattttgtatttttagtagatacggggtttcaccatgttggccaggatggtctcaatctcttgacctcgtgatccacccacctcggccttccaaagtgttgagattacaggcgtgagccaccgtgcccggccgtgactgtgttttatgactctcatatatgttaagacattctctcctatgcatcaaatatcacataaatattgtttcatattatattgttcaaaagagaaaaagtctatggtcctccccatcttagtcactcatccttttaagccctgtaattccattagattgaaccctatgaaattgccaagattcagtccttttggggtgggatgtgtgtgtaacaatttatttatttgttgtttttgaaaaattgtggtgccatggcacagtggctcatgtctgtaatcccaacactttgagaggctgaggtgggaggatcacgtgagcccaagaattcgagaccagcctgggcaacatagtgataccctatctctacaaaaaaaaaaaaaaaaaaattagccaggtgtggtgacatgtacctgtagtcccaggtacttgggaggctgaggcaggaggatcgcttgagcccaggaggcagaggttgcagtgagctgagatcacaccactgcattccagcctgggtgacagagtgatccgaggtgggtggatcactaggtcaagagatcaagaccatcctggccaacatggtgaaaccccgagtctaccaaaaatacaaaattagctgggcgtagtggcacgtgcctgtagtcccagctactcaggaggctgaggcaggagaatcgcttggacacagcaggcaggtggaggttgcaatgagccaagatggagccactgccctccagcctggtgacagagcaagactctgtctaaaaacaaaaacaaaaacaaaaacaaaaaaaacgagtaaaagaaaaattgtagtaaaatgcacataacataaaatttaccattagtggcatttcatgcatttgcagtgttgtgcatccatcaccgctatcttgttccagaacattctcatcaccccaaaaggaaacccagtacccattaagcagtcactccccccccattctttgccttcaacccctggcgaccacccaggtacattctaactctacagatttgctgaaatttgaccttgtggcctgacatggtatctcatgtctgtaatctcagcacttttggaggccaaagtgggaggactgtttgaggccaggagttcaagaccagcctgggcaacatagtgagacccctgtctcttttggaaaaaaaaaaaaaaagaaagaaaaataaaaagaaattcaacctttttgacctagaaaaatgaaaatttctttttttttttttttttttgagacggagtcttgctctgtcgccccggctggagtgcagtggcacgatctcggctcgccgcaagctccgcctcccaggttcacgccattctcccgcctcagcctcctgagtagctgggactgcaggtgcccgccaccatgcccagctaattttctgtatttttagtggagacggggtttcaccatgttagccaggatggtctcgatctcctgacctcgtaatccacctgcctcggcctcccaaagtgctgggattacaggcgtgagccaccgcgcccggctgaaaaatgataatttcatatggattgacttaagaaccttttaggatggttgggtgtggtggctaatacctgtaatcccagcactttcggaggctgaagcaggtggattatttgaggtcaggagtttgagacaaccctggccaacatggtgaaaccccgtttctactaaaaatacaaaaattagctgggtatggtggcaggtgcctgtaatcccagctacttaggaggctgaggctggagaattgcttgaacctgggaggcagagggtatagtgagccaagatcacaccactgcactcgagcctgggcgacatagcaagactctgtctcaaaaaaaaaaaaaaagaaaagagaaagaaaaagaaaaaaagaagcaaaaaaaatccttgtaggatgttctcattcaaaatttctcccaggaggaaatggctggtgagttgagggggtagtgctcggcttttcacagggtggctgagagagaatcccctgcacgtacacactggcccccctcctgccttccgaggcctgtagagaccctgttcttggcccatagcaacccccagacctccaagtgacagccctcagctccagggacaccagaaaatctttgccttcccaaatctaagatttttgttttgtttttgtttttttggaaacggagtcctgctctgtcgcccaggctggagtgcagtggtgccatcttggctcattgcaacctccacctcccaggttcaaacaattctcctgcctcagcctcctgagtagctgggattacaggtactccccaaccaagcctgactaatttttttttttttttgtattttcagtagagacagggtttcacaatgttggccaggtgggtctggaactcctgacctcaaatgatccactggccttggcttcccaaagtgctgggattacagaagtaagccactgcgcccagcctcaaatctaagacacttaaaaatttgtttttttggttttttttttttgagacgcagtttcgctcttgttgcccaggctacagtgcaatggcgcgatctcggctcaccgcaacctccgcctcccaggttcaagcgattctcctgccttagcctcccgagtagctgggattacaggcgcccaccacctaggctaattttgtatttttagtagagacggggtttctccatgttggtcaggctggtcttgaactcccgacctcaggtgatccacccaccttggcatcccaaagtgctgggattacaggcatgagccaccgtgactggcaatttttttaaaattttaaattattttttcgagtcagggcctttctctgttgctcaggctggagtgcagtggtgcattcacagttcactgcagccttgagctcttgggctcaagcgatcctccctcctcagcctccacctcccacttcagcctccagagtagcaggactacaggctcgctccaacacgcctggctaattaaaacaaattctaggggggcagatgctgtggctagcacacgtaatcacggcactttggaaggccagtgtgggaggattgctcgagcctaggaattggaggcaagactaggcaacagagacagaccccatctctacaaaaagttttttaaaaaattagctgggtgtggtggcttgagcctgtagtcccaactactttgggggctgaggtgggaggattgcttgaacccaggaggtcaaggctgcggtgagctgtgatcacaccactgcactccaatctgggtgaagagtcagaccctggattaaaaaaatatatatttttcccccagagacagcatctcactatgttggtcaggctggtctcaaaatcctagcctcaagcagtcctcacacctcggcctcctaaagtgtggagattagaggtgtaagccatcctgcctggctgcaattctaagaaatgtatgttgaaaaacttagtggatgtatcaggagtttatcaagatgaagcatctgaggaacagaccatcgttaacttttcaagttaaagcaagtttgagctcccgggcgtggtggctcatgcctgtaatcccagcactttgggaggccgaggtgggcagatcatgaggtcaggagatcgagaccatcctggctaacacggcgaaaccccgtctctactaaaaatacaaaaaaaattagccgggcgtggtggcgggtgcctgtagtcccagctactcgggggggctgaggcaggagaatggtgtgaacccgggaggtggagcttgcagtgagccgagatcgcgccactgcactccagcctgggcaacagagacagactccgtctcaaaaaaaaaaaaaaaaagaaagaaaaaaagaaagtttgagctgataaagggaaggttccacctcggtttctttcctcttaatctcttcttcaggccagggcagattcccacaggagattggggctggcaggatgtccctcctctcccaaggagggggcttcccgggacagaagaggaggggaggggacttgggggatgttttcctctctgagggtccggggtgagggtcagccaacgcagggtcacctagtcagggaaacagagtggaggaagccctgggtcaaacagtgagtcccagctccttgtctcacgaacaacttcctctagcaaagtgatttcattctctaaaacaataacaaaagaagtgtgtaaatatatcccttgaatccctaaagcacgcacaaaaaaagcacaaacagaaagaactgctgaataaagaggttccaaagttggggttggagccacttcctcttgctaagcctgcgtggtatgtgtactttaagaattcacgttacagtcttgttgctgttgcgtgagcctagcgtatactatgtgccaggcactgctccggtttttttgtttttgtttttttgagacagagtctcactctgtcgcccaggctggagtgcaatggtgagatctcggctcactggaacctccgcctcctcggttcaaatgattctcctgcctcggcctcccgagtagctgggattacaggcacgcaccaccacgcccagctaatttttgtatttttagtagagatggtgttctgccatgttggccaggctggtcttgaacacttgacttcaagtgatccacctgcctcggcctcccaaagtgctgggattacagatgtgagctaccgcgcccagccagttctgtgcgttttaaatgtatccaacgctcatagcaaacatccactgcacagatgaggaagttgaggttcagaggggctgaggccctgaactttgatgagggtgtgtcgacctggaatatgaatctcatcattctggcccttgagttcttgttctcagccactgtgatatgctggaagaggttaagaattgctatcacggctgtggctcacttctgtaatcccagccctttgggaggtcgaggtgtgaggatggcttgaggctgggcaacacagcaaggccgcacctctacagaaaattttaaaaaattagccaggtatgttggtgcatgcctgtagtcctagctactcaggaggctgaggtgggaggatcacttgagcctaggagtttgaggctgcagtgaggcataatgttttcactgcacgccagtctgagcgacagagcaagactccatctctaaaaaaagtaaagcatcgctatggccaacaacatcttcccattctacagatggaaaattgaggcccaagaaaggagttgtttgtgctttttctaccactgaggcgttgggccctgcgctcagctgctgtggtctttttgtggagaatgtgaccccaggctgtcttcctcagagccgaggaggagggagggatgtttgtctgtcctgaggctgcagaagggaggggttgaacacagttagaggcctggaggtggctgggggcagctggcatgttgtgggcaaacagaatccaggccaagacctctaaggcgttaaagagcaaaccgcatgcaggtctggcttccaggaaggtgggacttcgagactagggttggggacttgggatcagccctccacccaaccgagccctctcctgccctgccagccaccccgtaattttgggttctgtgagtcacgggaagaagacaggacaaacacaccctgagagcgagacaaggccactcctattttgtactgcttataaagattcactgggactggtgaggtggcagtgctcagcagcatccgacaggagccctggcaaacaggacggatttccaggactctaccagctgccagacacggcagggagagaccccagacctcctgggtcctggctgtgggcccggattgggctcccaagtggcgtttgactcacgtggggacactcttggaagagacggtaaggatggaggctacaagggcgggaaggagggagagagagattgcatgatcttggcttctcggaatcattactttcagaatctgggaagcagaactagagtttgagaagtgcagtcttattacagccacactggaacgcacgtcacagtcctgggctcttgaattaacttgggcagcccagcagcaaagctcttgtcaaaggatctaagcattttttttctttctctttttggagacaggttttcattcttgttgcccaggctggagtgcaatggtgccatcttggctcaccgcaacctccacctcccaggttcaagggattctcttgtctcagctgggattacaagcgcatgccaccatgcctggctaattttgtatttttagtagagatggggtttctccatgttggtcaggctggtctcgaactcccgacctcaggtgatctgtccgccttggcctcccaaagtgctgggattacaggcgtgagccactgtgccctgcccaaatggtttttcacacacagatgtatgggaaacagcctctctcaaacctgcaggaattcctgcagctttcggcagatccaccaaactgtagcatgtgtagcaagcaagccctttaactcagcgattccaattcttttctctttctttccttttctctctttctttcttttgacagggtctcactctgtctcccaggctggagtgcagtggtgcgatcttggctcactgcaacctccgcctcccaggttcaagtgattctcctgccccagcctgctgagtagctgggattacaggtgcacgccaccacacctagctaatttttgtatttttagtagagatggggtttcaccatgttggccaggctggtctccaacttttgacctcaggtgatccacctaccttggcctcccaaagtgctgggattacaggcgtgaatcaccgtgcctggccccctcaatgttctatcacaaaatctgtccacattcttgtgtggtgtttgttcattctcatcgtgtagaatattccacagggtgaacaccccatgatgtgtttatccattctgctgtgggtggctatttggacggtttctcatcttgggctgctgtgaacattctggcacatgtattctggtgagcatatgtgttcttttgcggaaaggaggctgattgctgggtcgtgagggaggaatcctagaagatggatgttcaggaataaagaatgttcagactccttttttttttttttttttttgagatggagtcttgctcaggctggagtgcagtggtgcgatctcggctcactgcaacctccgcctcctgggttcacgccattctcctgcctcagcctcctgagtagctgggactacaggcgcccgccaccgcgcccagctaattttttgtattttttagtagagatggggtttcaccatgttagccaggatggtctcgatctcctgacctcgtgatccacctgcctgggcctcccaaagtgccggggattacaggtgtgagccactgcgcccggccagccttctttgattctgctccagggttttccagagcagagaacccagcaagactggatgcacagacaggcgtgcaccaagaggcacatgtgagggtgcttgcaatcacaacaaaagaaacctaagtgaccacttagtctctctgtgcctcagtttactcttttatcctttcacttaccaaatatcgaccatgcctgtgctgtgtgccaggttctgtcccagatgccagggacacagcggcacccgaggctggaaggagctgatgttgtgggatatgaggatgataatattgacctcaagggtttgtgttgagggttatatcttgtaggtcataggtgctcaataaaagccatctattattttaattattatgaaataataagaagggtacctatgatttaaaagctagatataagtacagacgctctttgacttacaatggggtcccatctctatcaacccatcgtaaggctgggcacagtggctcacgcctgtaatggcagcacttttgggaggctgaggtgggaggatttcttgagcccaggagtttgagatcagcctgggcaacagagtaagggctgtccatacagaaaaaaaaaaaaaaattagctgggcatgatggcgtgcacccgtagtcccagctactccagaggctgaggcaggaggatcagttgagcctaggaggtagaggctgtggtgagccgaggttgaaccactgaactcagcttgggtgactgaacaagacgaaaacacaaaacaaaagcccccaacattttcaacataagttgaaaatattgtaaatcaaattggatttaatacacctagcttactgaacatcatagcctactttttttttttgagacagggtctcactctgttgtccaggctggagtgcagtggcgcgatcttggctcactgcagccttgacctcacgggcgtagcctacctcaaatgtgttcagaacatttacattacccaacagcaagacaaaatcatctaagccaaatccaatttttttttttttgagatggagtctcactctgtcacccatgctggagtgcagtggtgtgatctcagctgactgcaacctccacctcccagcttcaagggattctcctgcctcggccttctgagtagctgagattacaggcactcgcccccacgcccagctaatttttttttttttttaaatctttagcagagatgagattttatcatgttggccaggctggtctcaaactcctgacctcaagtgatccgtctgcctaggactcccaaagcgttgggattacaggtgtgagcttctgcacctggccctgtttctcattattctccttaccattgttattgaatggcctttagttaataagcaccacttgggcagacagtggactgtttttgatgctttgaggacgaatggggttgatatctgtacagatagacaggaaaacagatatcgggcacgttaagtggaaaagatgaagaaatggaacaacgtatgttgaaagctcccatttctggttaagacgttacaaaggaaatgccatctacgataccattgctttgggcttacagctgggcaaattatatgcacagaaagtttcctggattgggctgggcatgttgactcacgcctgtaatcccagcactttgggaggccgaggtgggcggatcatgaggtcaggagattgagaccatcctggctaacacggtgaaaccctgtctctactaaaaatacaaaaaattagccggaagtggtagcgggcgcctgtagtcccagctactcgggagactgaggcaggagaatcatgcgaacccgggaggtggagcttgcagtgagccgagatcgcaccactgcactccagcctgggcgacagagtgatactccgtctcaaaaaaaaaaaaaaaaaaaaaaaaaaaaaaagaaagttttcgttttctggattgtaatcaacaagggccaggaagggtggagtctttgcggggtgagaggatgcgtgtggacagtgataacagcagctagcctacgtatgacacccactgaaaaccagcgctatacactcagctctacccttctaacttgttgaattcttacaacaccccctaaggcaggaatattattattcccattttactgaggcacagatagtttaggtgacttgcccaaggccacacagctggtaggaatttgagggtttttgttgttgttgtttgtttgtttgttttttatgatgcagtctcgctgttgtcgcccaggctggagtgcagtggcatgatcttggctcactgcaacctctgcctcccgggttccagcgattctcttgcctcagtctcccgagtagctggaattacaggagcccacaaccatgcctggctgatttttgtatttttagtagagaccaggtttcaccatgttgctcaggctggtcttgaactcctggcctcaagtgatccgcccacctcggcctcccaaagtgctgggattacaggtgtgagccactgtgcccggctagggggggttcagtttttaaatgctgtactctttctttctttctttccttccttccttccttccttccttccttccttccttccttccttccttccttcctttctttctttctttctttctttttctttctttcttgggacagggtctcactctgttgctcaggctggagtgcagtggcgcgatcatggctaactgcagcctcaaactcctgggctcatgtgatcttccaccccagtcttagaaaaggttgggattgcaggcacgaaccactatgcctggctaatttttaaattttttgtagagacagagggtctcactgtgttgcctaggctggtcttgaactcttggcctcaagcgatccttcctcctcaactcagcctcccaatgtactgggattacaggtgtgagccactgcacctggctaaattctgcacaccttttactctagggataaaaataatacgaaagtggaatgccagactccgaatacacacaccaagtggcctggactcttcactgctacctggcatgggggaggggagtgccccaacttcctctctgtccttcctgttgcctcaacaccagctggagtgctgagcagtgccagccaacccataatagtcagcagagagcctcagggccaggtcactctgacattgtgggggtgggggggtggggactcctgcctgggtcctgtgctacccacagctttgtctaccggagcctgtgtgccacgtgctggacaaatcttaactcctcaaggactcccaaaaccagaggtaggttcacctcaatgactcttgtttccccgatgaggaaataggcacagccagctgcaactgacacccacagtcatggaggccggggctgctcaggaccacttgctgtgctgcctgccagctctccagagcccaagatttggagatggtaatattctagggcatggggttctgcagcggggactaacacactttgaaatttacctacttagggctgggcgcggtggctcatgcctgcaatcccagcactttgggaggctgaggtgggcggatcacaaggtcaggagttcgagaccagcctggccaatatgatgaaaccccgtatctactaaaaatacacaaattagttgggcatggtggcgggtgcctgtagtcccagctactcaggaggctgaggcgggagaattgcttgaaccctggaggcggaggttgcagtgagccgagattgcgtcactgcactccagcctggatgacagagcgagactctgtctcaaaaaaaaaaattttacctacttagctgagtgatcttaggtaaattacttaacttctctgtgccttatctgtagaataaatataacaatagtgtcaaattcagacagttattataaggtttcagtgaggtcaggcacggtggctcatgcctgtaatcctagcactttgggaggccgtggcaggcagaccacttgaggtcaggaattccaaaccagcctgaccaacatggtgaaaccccgtctctactaaaaatacaaaaaattagccccgggcatggtggtgcacgcctgtaatcccagctactcgggaggcttgtggcaggagtaatgcttgaacccaggaagcagaggttgcagtgagccaaaatagcgccactgcactccagcctgggtagcagagtgagactccgtctcaaaaaaaaaaataaataaaataaaataaaacaaggtttcagtgatacagtgtttaaagctgcgtggtggccactgcctgtagtcccagctactcagggggcagaggtgggaggatcacttgagcacagagtttgaggctgcagtgagccgtgattgcaccactgcactccagcgttggcaagatggcgagaccctgtctctaaaaaaaatatatatatataaatttgccaggtgtggtggtgcacacctgtagtcccacgtactcaggaggctgaggtgggaggaccacttgagcccaggagttcgaggctgcagtgagccaagatagtgccattgcattccagcctgagtgacagagcaatatctgtccctaaaaaaaaaaaaaaagttgacacaaaacacaaaatgttcaagaaacagtggcttccaataataataattttattattattattattgtcaggcacagtggcaatcatgcctgtaatcccagcagtttgagaggctgagacaaggcaggttgcttaagccccagaattcaagaccagcatgggcaacatggtgaaaccagatgacctccaaaataataataataataataataataataataattaatcaggcatgatggtgtgcacctgtagtcctagctacttgggagggtgaggtggagggttgcttgagcccaggagatggaggctgcagtgagctgggaaagtgccgctgcagtccagtctgggctacagagccagaccctgtctcaaaaaatagtaataatatagtaataatattattgtggcccgacatggtggctcacgcctgtaatcccagcactttgggaggctgaggcaggtggatcacctgaggtcaggagttcgacaccagcctggctaacatggtgaaaccccatctctactaaaaatacaaaaattagccaggtgtggtggcatgtacctgtaatctcagctacttgggaggctgaggcaggagaattgcttgaacccaggaggcggaggttgcagtgagccgagatcatgccaccacactccagcctgggcaacagagcaaaactctgtctcaaaaaaaataaattattgctatgatagattatgtcgcttccttgctcagcaccctcctatagcacctgtctcatttggaataaatgatgatgtccttgcgttgcccacgtggccctacatgccgtggcccctgataactgtttttcatttgttttgttttgttttgtttttttctttttttgagatggagtcttgctctgttgcccaggctggagtgcactggcatgatctcagctcacagcaacctccgcctccctggttcaagtgatccctcctgcctcagcctcctgagtagctgggattacaggcgtccaccatcactccaggttatttttgtgtttttaggagagatggggtttcaccatgttggccaggctggtctcaaactcctgacctcaggtgatccacccaccttggcctcccaaattcccgtgattactggcatgagccactgtgcccggcccctgatgactctgctattgcctctcaccctctccctctggcagattccactccagccacactgggctccttgctgttcttggacatgaccgtcatgttcccacctcagggcctttgcactggctgttctcgatgcctgaaacactcttcccccagatctcgatgcatctctcccactgttccttcagatttttatgcaaatgtcaccttctcaagaagccttccctgaccatgcctgtacaactccaacatagccagcttccctgtgtgatatttttcccatagtatttattatcttctaaaatactgtggattttggattttgctcatttctttctttcttttcctatttttttttattttttgagacagagtctctctctgtcatcctggctggagtgcaggggtatgatcaagctcactcaatctcctgggctcaaatgattctcccacttcagccttttcggcagctaggatcacaggcacgcatgaccatgcctggctatgttttaaaaaattttcgtagagatggggtctccctatgttgcccaggctggtctagaactcctgacctcaagtgatcttcccaccttggcctctcaaatcgttgggattacaggcctgaaccaccgtgcccagccccaatattccaatgtactagggttctggcattgtaatattctagaattccaagatgccacttctaacaacactaagttctagaattccaattttttttttttttttttgagatggagtctcactctgtctcccaggctggagtgcagtggtgtgagctcagctcactgccacctccaccttctgggttcaagaaattctcagcctcccaagtagctgggattacaggtgcccgccaccacacccagctaatttttgtatttttagtagagacggtgtttcaccatgttggcctgtcttgaattcctgacctcaagtgatccacctgtcttggcctcccaaagtgttaagattacaggtgtgagccaccacacccggcctagaattccaatattctaaagcactggagtccttatgacgcaatattccagtttgcaaggtgctggtgggccgggctgatggacaccctagatctccagggccatggagtttcctcctctgagttttcatcgtctttctctcctgcccagacaccaggagcctgaatggggaacgattctgtcagctacgagtatggggattacagcgacctctcggaccgccctgtggactgcctggatggcgcctgcctggccatcgacccgctgcgcgtggccccgctcccactgtatgccgccatcttcctggtgggggtgccgggcaatgccatggtggcctgggtggctgggaaggtggcccgccggagggtgggtgccacctggttgctccacctggccgtggcggatttgctgtgctgtttgtctctgcccatcctggcagtgcccattgcccgtggaggccactggccgtatggtgcagtgggctgtcgggcgctgccctccatcatcctgctgaccatgtatgccagcgtcctgctcctggcagctctcagtgccgacctctgcttcctggctctcgggcctgcctggtggtctacggttcagcgggcgtgcggggtgcaggtggcctgtggggcagcctggacactggccttgctgctcaccgtgccctccgccatctaccgccggctgcaccaggagcacttcccagcccggctgcagtgtgtggtggactacggcggctcctccagcaccgagaatgcggtgactgccatccggtttctttttggcttcctggggcccctggtggccgtggccagctgccacagtgccctcctgtgctgggcagcccgacgctgccggccgctgggcacagccattgtggtggggttttttgtctgctgggcaccctaccacctgctggggctggtgctcactgtggcggccccgaactccgcactcctggccagggccctgcgggctgaacccctcatcgtgggccttgccctcgctcacagctgcctcaatcccatgctcttcctgtattttgggagggctcaactccgccggtcactgccagctgcctgtcactgggccctgagggagtcccagggccaggacgaaagtgtggacagcaagaaatccaccagccatgacctggtctcggagatggaggtgtaggctggagagacattgtgggtgtgtatcttcttatctcatttcacaagactggcttcaggcatagctggatccaggagctcaatgatgtcttcattttattccttccttcattcaacagatatccatcatgcacttgctatgtgcaaggcctttttaggcactagagatatagcagtgaccaaaacagacacaaatcctgccctcagggagctgatattcttctagtggaggaagacagactataaacaaagatatatagggccatttgcggtggctcacgcctgtaattccagggctttgggaggctgaggcaggtagatcacttgaggtcaggacttcaagaccagcctagccaatatggtgaaaccctgtctctactaaaaatacaaaaattagccgggcatggtggcgcatgcctgtagtcccagctacttgggaggctgaggcagaagaatcgttttgaacccgggaggcagaggtgacagtgagccaagattgagcccctgcactccagcctgggcgacagagcgagactccgtctcaaaaaataaataaataaaagattctatttatttatttatttttttgagatggagtctcgctctgtcgcccaggctggagtgcagtggcacaatctcggctcactgcaagctccgcctcctgagttcacgccattctcctgcctcagcctcctgagtagctgggactacaggcgcccgccaccatgcccagctaatttttgtatttttagtagagaaggggtttcaccttgttagccaggatggtcttgatctcctgacctggtgatccacccgcctcagcctcccaaagtgctgggattacaggcgtgagccaccgcacccggccaaaagattttaataggatccctctggttgctggtggaggtgagagtatggtgtaggggcagtgaagatcccagagaggaggctactgtaatggtccaagcaggaggtgatagcgatttggatcagggtaacagagctgaggtggtgagaggctgacaggtcatgcatctattttgaaggaaaggccaagtccaggctccttagctcggcattcaaggcttctctccaccactggacacacttactctctagcttctcagaccctgtagcaatcagaatcatgacccccggtgatgtccacatcttaatcccctgaacctgtgaagaggtgaccttccatggcaaaagggactttgcaggtgagattaagtaaaggatcttgagaaggggtggttatcctggattgtctgggtgggctcaatggagtcacgagggtccttttaagagggaggcaggagggtcagggtcagtcacaggaggtgacaacggaagcagatgtcatagtgacgtgaggaggtgccaagaaatgcaggcagcttccagaagctgaaacagacaaggaaacagattctctctgaagctcccagaaggaacacagacctcctgacacttttagacctctgatccgcagacctttaagaaaatacatttgtattgttttaagtcactatgtttggggtgatttgttatagcagccgtgggaagctaatacacacccttcgggctatattcacgcttctgcatctttcctgaagctgtgccactggctggaatgtccttctgatctatgttgtgcagttcaacaatcaagagccatctgtggctattcaaattcgaatcaattggccaggcctggtggctcctgcctataatctcagcactttgggaggccgaggtgggaggattgcatgagcccaggagtttgagaccagcctgggcgacatagcaagaccccatctctacaaaaaatacaaaaattagccagacgtggtggggcgtgcctgtagttccagctactgaggagggagttgcttgaatccttctgcttcaatcctccttaaagcaggtagattgcttgagcccgggaagtggagtttgcagtgagcttagatcacaccgctgcactccagcctggatgtcagaatgagactccatctcaaaaaaaaaaagaaagaaagaataaattttcatttcaaatttagttcctcgggcacactggccatagttcaagtgctcagtagccacatatggctggtgactgccatattcgacagcacagctatagaacattgccatcataacagagatttctgttacaaaatgctgttctagaatttacttttgaactctacctgctcagatcttttaaattacatggtaggccaggcatggtggctcacgcctgtgatcccagcactttcggaggcccagtcgggaggatcccttgagcccagaagctggagacctgcctgggcaacagagcaagaccccatctctacaaaaataaaaaaaagaaaattagcctggtttggtggcacatgcctgtagtgccagctactagggagactgaagtgggaggattgcttcagcctgggaggttgaggctgcagtgagccgtgatctcatcactgcactctagcctaggtgacggagcgggaccctgccgctaaataaataaataaataaataacatagtagtgatacctgtgtctgcggtcattactccagaacagcacttcacatatagtttctcctttaaggtcattctcacaacagcccagggagatagggtggcatgcttcattttataagctgaggtcctgggaggggaggtcatttacccaagatcacacagcaagaacaccagacagctggaatttgatcccagttttgactccaatgctcttgctcttcatcatcaataatttccttcaaggcgtccctcaaatgtcacttcctccaggaagccctccctgatttatgctccttccagaaagaatgggctcttcctttctctgagtctctggaacacaaggtcccagctaaactgtaaattccccaagggtaacaactggactaattttttttaatttaatttaattttatttttttgagatgaagtcttgctctgtcacccaggctggattgtagtggcacgatctcggctgaccgcaacctccacctcccgggttcaagcgattcttatgcctcagcctcccgagtagctgggattacaggcgctgccaccacacttggctaatttttgtatttttagtagagacagggtttcaccatgttggccaggctggtctcgaactcctgacctcaggtgatccacccaccttggcctcccaaagtgctgggaatacaggcatgagccaccgttcccggccttatccttgacttagaatacctaacctcctgggaatgcagcccataggtctcagccttatttcacccagctcctgttcaagatggagtcactctggttcacatgcctctgacatttccccgctcccttttataagagaacctttaatcctaagggttgtagagggaggaagatacaacttctgtgacttcttcaggctggacaggggtgacgatatacctgcctaactcttaggatctattggattcagggtagacaggagctcagtcagaaagcactggtatcactttttttttttttttttttttttgagacggagtttcactcttgttgcccaggctggagtgcaatggcacgatctcagctcaccacagcctccgcctcccaggttcaagcgattctcctgcctcagcctccccagtagctgggactacaggcgtgtgccaccaaacccagctaatgtttttttttttttatttttagtagagacggggtttctccatgttggccaggctggtctcgaactcccgacctcaggtgatccacccgcctcggcctcccaaagtgctgggattacagacatgagccaccacgcccggcctgatattttattacttagtattttactctgaattatcatgcgtgaattaagaccaaggctgtcttgtaaaataaaatttgttgtggaacaatttatacagctcctttgaggtaggaggcaggactcaactctggagatggggctcggctcgaatattggaccaaattgaggaccagctaaaacagggaggaggctgaagcaacttattatttttatttatttttattttttggagaaggagtcttgctctgttacccaggctggagtgcagtgacacgatctcggctcactgcaacctccaccttccggattcaagtgattctcctgccgcagcctcccgagtagctgggactacaggcgcatgccaccatgcccagctaatatttttgtattttttagtagagatggggtttcgccatattagccaggctggtcttgaactcctgactcaggtgatctgcccacctcggcctcccaaagtgctgggattacaggtgtgggccaccacgcctggcccgaagcaactttctatgacacgcctaccagtgtgccatgtcagtttgccattgccatggcaacacacccaggagttactgccccttcccatggcaatgaccccatgacccagaagttactgccccttccctagatatttctgcataaactgccccttaatctacatgtaattaaaaataggtataggctatttttatacctatataaataggtataggctaaaaataggtataggctgggcgtggtggctcatgtctgtaatcccagtactttgggaggccaatgcaggtggatcacctgaggtcaggagatcaagaccatcctggctaacatagtgaaaccctgtctctactaaaaatacaaaaaattagccaggcgtgttggcgggagcctgtagactcagctactcgggaggttgaggcaggagaatggcgtgaacccaggaggcggagcttgcagtgagccgagatcacaccactgcactccagcctgggtgacagagcaagactccgtctaaaaaaaaaaaatagtaagaaagaaggaaagacacaaagacagaaagaaggaaggaaagaaagcaagctgttttcccctgccttgcccctgctcacctttgaattcttttctgggcaaagccaagaaccctcgtgggctaaaaccccgctttggggcttaaagtttgcaaaatcctcccattaatctattgggaccagttgccacttaggagcattctttgataacttttacaaaacatcttttgtggtttttgaaatgttttcattttgtagatcattagcccttcttttttgaactggaatacatttcacgggaattttcaaatttaagtctgtgcaatgttacataaaatacctttgattattaaaagccatctgttttgctataacttcccttttttgttctaaagtttgtctatttctgctatttgtttttttaccatagaaatattgatttccttaagttttcaaagaaccaagttattaataatttctctaagaactagtctcaagcttgctatacaatcctatggttgatagactgtggctttcttgttgatttccatttgttgttcatttcctccaattttccttttttaaaaattataattattgtttggattatttatttatttatttatttgtttgtttgtttatttgagacagagtttctccttgtcgcccaggctagagtgcaatgatgcgatgttggctcactgcaacctccacctcctgggttcaagcgattctcttgcctcagcctcccgagaagctgggattacaggtgtccgtcatcatgcctggctaattttttatatttttagtagagacgggatttcatcatgttggcttagctggtctcgaactcctgacctcaggtaatccacctgcctcggcctcccaaagtgctgggattacaggcgtgagccaccgcacctggccttgtttggaaattttaagcagaatgcttagtccatttattcttcttcttttgataataatgtatgaattggcttctctatctctaagttgttttccagaggcttgataattatatccaacgttccacttgacatccccagttgatgtccaatgcataactcaaacaatatgctgaaaacagatcttcggattttctctctagcctctctcccacgtcttcctgatggtagtagatggtgactccatatttccaaatgctcaggccaaaaactttagagtccttcttttttttagacatagaacttttttctggccaggcacggtggctcatgcctgtaatcccagcactttgggaggccgaggtgggcggatcacgaggtcaggagatcgagaccatcctggctaacacagtgaaaccccgtctctactaaaaatacaaaaaattagccgggcgtggtggcgggcgcctgtagtcccagctatgcgggaggctcaggcaggagaatggcgggaacctgggaggcggagcctgcagtgggccgagatcgcgccaccgcactccaacctgggcgacagcgagactccgtctcagaaaaaaaaaacaacaacacttttttctttttttgagacagtctggctctgtcacccaggctggagtgcggtggtaccatcatggctcactgcagcctcagtctctcagcctcctaggttcaatcgatcctcccacctcagcctcttgagtagctgggactacaggcacacactaccatatccgactaacttttgtatttttttgtagaaacaggggttggccatattgcccaggctggtgtggaacgcctgacctcaggtgatccacctaccccggcctctcaaactgttgggattacaggcgtgagccgccgtgcccagctgtttcttctttcagttaataaaagagagggtgcattgctggctaatgagattgtttctatacttgggggtcttcctgaatgtgtgtgattgagtttattgcagagaaaggtaacagaaaatggggttgtagaaagaaaagaggtagaggctgagtgagatgccccacatctgtaatctcagtgctttgggaggccaaggcgggcggatcacttgagatcaggagctggagaccagcctggcccaaatcgtgaaacctcgtctctactaaaaatacaaaaatcagccaggtgtagtggtgtgcgcctgtaatcccagctactcgagaggctgaggcaggagaatggtttgaacttgggaggcggagattgcaatgaggtgagataacgccactgcactctagcctgggagacagtgagactatgtctcaaaagaaaaaaaaaagttcctgggccccagaccagctctctctttgggttaaaaccccggcgtcccggagctgaggcgcacgtggctatgcttggggaggagagggcggggccggggaggaggcgcttgcaagtctgtaccgcaatgcctctactggcctctagagggcgcaatcactcgaggctccgccccaagcgaggcggggcggaagcgtgctgtgcacaggcgcaagatgggtcttgggcagcccagagcttccgattggctcttctgtggtggcggggcggggtcagaacgagatggctgtgtgcgcaggcgcaagactagcgctcttgggaccggaagttaaggcgttcgcggcgtgtggtaagtgaggggggcgggacgggtgtaccgggttgtggcggcgatggctgtcggagttgggccgcttgggggtagtttggggtgcgagtccaggggcgagggaagtctcgagatgaggagaaatgtaggaggcagccgaagggccggcaaacgcggacagagatggcacctgagcgtccctgggagaacctgggcgacaggccagagaccgaaagaaatggaggcacgaaaagaagcttcgagaaactgagggactgaaagacgagggtgttgggagaggagggaagctgaaaactagagagcgtgggcgagagtgccgatgggttccagcgagagtcttagagcccacgaggccgagaggcgtggtcgcccatgaacttggggagtggagggaaaagtcggaaactgatcgtggacactagaaacagaaaaaatggaatttagatggagaaacgagacactgaatcacgggggagaccgagagatacggaaggatggagacagttgaaataggaagaaccccacaaaagctggagataatggagaacgatgctgagaaatggaaaagcgagggagtggagcccgaacccctggatttgagtggctcatgtaacactcggctactcacttagcctctctattgctcagtaaaatagggggtgatcatagtgcctgacagtcgtgagaaaagtgtgtgtgtgtatgtacataggtgtgggataggaatagatcatgcagataggataggtctgtgtgttaatgtgagtaagtaagcatgagctattactaaagcttctgatattgggagataaagtattagatggggaaatggagagaggtggtgatggagagtgaatactggaaggacaaaagggaggaaaaaaagattcaaacagaaaatgagaaagggcgtggtgactcactcctgtcatccacagcactttgggaggctgcggtgggaggatcacttgagcttgggaggtcgaggctgctgtacgccgtgattgtgccactgcacttcaggctgggtgacagagtgagaccctgtttcaaaaaaacaaaaatgaattttttttttttttttttgagatggagtttcgctcttgttgcccaggctggagtgcagtggtgcgatcttggctcactgcaacctctgcctcctgggttcaagcgagtctcctgcctcagcctccagagtagctgggattacaggcaggtgccaccaccctggctaattttgtatttttagtagagacgggatttttccatgttcgtcaggctggtctcgcactcccgacctcaggtgatctgcctgcctcagcctcccaaagtgctgggattataggcgtgagccaccatgcccggcctgaaaaagcattttttttttaatgagaaagatggagaaagtcaaatggagaactgaagagagatggagaaaggaagagttggattacagagaaaaatcagactacagaatgactcataagtgaagagagatgcgagctgactaggacagggaagagagatgagggtgatgatgaacaagacggactgaaaaagagacagaggcctgaagatggagtggagagagatggaggggacagagggggaaacaaacccactgaaggccatgagcccagggcaaataggccaagagaccaaaagatggtcagagacacagttatacagaaactagaagatgcagacaatctagaagccaaaaaagatagataccttgagaggagcgggatgctgtcagtggggcccagcatgcataagcagtttctagcctcagaagaatgctctcattttctttttctttttttttttttttttttttttttgagacagagtctcgctctgttgcccaggctggagtgcagtggctcagtcttggcttcctgcaagctctgcctccagggttcgagtgattctcctgcctcagcctcccgagtcgctgggactacccgagtagccaggtgcccgccaccacacctggctaattttttttctccagcctgggtgacagagcaagactccatctcaaaacaaaaaagactccaactgtaagcaaaaaggcattttctggtgtagctgagaagtggggggttgaagggaactaagcttcaagacctaaatgatgttgccaagcttctcttcctctccctctttcacctctccctgtggtgcagtgaccattcttgtgcctgtatctagttatttctctaggatagattttaggaaagactctgtcatgttccagagctaccacaaagagctccaggcttatatcaaacttgcctgattatgatggataaaatgagagcttttctgtcctagcaaccgagtgtaaattccacaaaagggccctgattggcccttcttggatcatgtgtccgcttctcaggccaatccttggttagagggggagtagactactaagactggccaggtctttgttacttgcctacccaataggggttctttgtcttaaaggccctcagaaccatgtagaatcgaggaagggctgttgtccaaaggaaggtggatactgtcctcagaaaagaagtaaagggttgtgccaggcaggcaaaaattacatataacacttgcaaaattttgccttttatctcaatgttctgaatctcactggaccccgggtgaagaacccttgccttattcttttcattatatcacacctctctcctattactgcctgtggagacaaggttctgctgttggttggccatgtgacctacatctctcctttaggtctcaggtgaaacatcccctcctcccaggatccttccctgattcccaagcatgggaaggaggaggaacctcctttggtgtcccacagctccctaggattctgttatcacagtccccatcactggattgtcacagtctgatgacgtgtgtgtcacatgagagatcatgtgatcatggccgtctgtgaggactctggtagtcatattcattacctcctttttctagttcagtgcttaagaaacaggctgttagaaatgtttctaaaaatgggctgggcatggtggctcacactggtaatcccaacactttgggaggctaaggtgggggaattgcttgagcccagaagtttgatatcaacctgggcaacatagtgagatctcatctctacaaacagtaaaaaattagctgggtgtggtggcatgtgcctgtagtcccagctgctcgggaggctgaggcgggaggatcgcttgagtccaggaggtcgaggctgtggtgagccatgattacggcactgcactccagcctgggaaacagagtgagaccctgcctcaaaaagaaaaaaacaaaacaaaaccaaaaaaagcaatgttcccaaaagagaattaatgtcttctgttctctctcttaagaatccagggcctgaaaacccagaatgaacttgtgtccatcccagagatcactgcagatgtcatgaggtaccctttgtgtcaccagctcaagcaggcctctggccactttatcatctgtggtggtcctgtgccgtgaccaggaggaaaaattagctctttgaagagaaagtagttctctattgcaggcactggcctcttaaattgttgcaggtggggaatggatgagaatatttgttttgggtgatcagaactgagactcctattgtggattagtaacatgcctcctcctagaacaagggagggcagggatcgccgagaccaccaccgggctcccagcgaggaagaggccttggagaaatgggactggaattgtccagagacgcgtcgcctcttggaagatgccttcttccgtgaagaggattacatccgtcagggttctgaggaatgtcagaagttttggaccttctttgaacgcctgcagagattccagaatctcaagacctccaggaaggaggagaaagaccctggacagcccaagcacagcatcccagcgctggccgacctacctcgcacttacgacccacgttaccgcatcaacctctctgttcttggccctgccacgcggggctctcagggactgggcaggcacttgcccgcggagagagtggctgagttccgccgagccctgttgcactacctggactttggccagaagcaggcatttgggcgtctggccaagctgcagcgtgagcgggcagccctccccatcgcccagtatgggaaccgcatcctgcagacgctgaaggagcaccaggtggtggtagtggccggtgacaccggctgtggcaagtccactcaggtgccccagtacctgctggctgctggcttcagtcatgtggcgtgcacccagccccggcggatcgcctgcatctcactggccaagcgtgtgggctttgagagcctcagtcagtatggctcacaggtgagtgggacgcaccaggtttccgatttttccagcgtgaccttgggggaataggttgcttgtccatatggcagtatcaataaaaatgaagcacttacccttggacccagcgatgattcttctagaactttatccacagagtggcttgtctgtggtctacatgacaaaggagctagcattaaccagtgtagcactttaacagcaaaacaatgggaaatgtcctaaaggctcatcactttttttttgagacggagtctcactctgtggcccaggctggagtgcattggtgcgatcttggctgactgcaacctctgcctcccgggttcaagcaattctcctgcctcagcctcctgagtagctgggattacaggcacccgccaccatgcccagctaatttttgtaattttagtagagacggggtttcaccatgttggtcaggctgggctcaaactcctgacctcaggtgatccacccacttcggcctcccaaagttttgggattacaggtgtgagccaccacgttgggctgcgagggtaattcttgacgatcactgcaatgcaaactgccatcttggaaggccaataatagtccttctgtctcatggtggtcatgaggatgaaatgggttgatatacataaagcacttagagtggcatataatgtcctggcacatagcagggactcaagaaaaggttattgctatatagttaatattatatatacatgaggcacagtgctagatactttctgtgcattgtcacatggaattctcacagcatctaggaggagaactataagggatggcattgcctgcccaaggtcagttggcactaagtggcagaggtgagattcaaacccaagctgttggactccagagtctgatgggtaggcatggtatttgcttagattttctttttgctttttcttttttttgagatggagtttcactcttgttgcccaggctggagtgcaatggtgcgatcttggctcactgcaacctccgcctcccgggtttaggtgattctcctgcctcagcctcccaagtagctgggattacaggcatgcgccaccacgcccggctaattttgtttgtatttttagtagagatggggtttctctatgttagtcaggcggatctcgaactccctacctcaggtgatccgcccgcctctgcctcccaaagtgctgggattacaggcgtgagccaccgcacccggcctgcttagattttcaatttgggcagggccaggggctggtacccaggctcagggtcctctcctgatcctttctttctcccaccccaggtcggctaccagatccgctttgagagcacacgttcggcggccaccaagattgtattcctgacagtggggctgctcctgcgacaaatccagcgggaacccagcctgccccagtatgaggtcctgattgtggatgaagtccatgagcggcatctccacaacgatttcctcctgggcgtcctccagcgcctgttgcccacgcggcctgacctcaaggtcatcctcatgtcggccaccatcaacatctcgctcttctccagctatttcagcaatgcccctgtggtacaggtgcctgggaggctgttccccatcacggtgagtacttccccctcctcccacatccccagacctccaacctggtctctgtccaaacctggacatgcctcttctctctgctgctgtatctcccatctctttcatttaaagatgttctctttttttaaagctaccattttctgagcattcataatcagctggttagagtgctaagtgcttgttagagtaaaagctgttacaagaagacccaaaaatggctgggcgccgtggctcatgcctgtaatcccagcactttgggaggccgaggtgggtggatcacgaggtcaggagattgagaccatcctggctaacatggtgaaaccccatctctactaaaaacacaaaaacaaaattacccaggcatggtggtgggtgcctgtagtcccagctactcgggaggctgaggcaggagagtggcgtgaacctgggaggcggagcttgcagtgagccgagatcgcgccactgcactccagcctaggtgacagagtgagactttgtctcaaaaaaaaaaaagacccaaaaatgtaaagtctcaaataagagaagtttatttctctcatataacagtgtggctggtccaggctgttgggcaactctgttccatgtggtcattcagggatccgggctcctcctttgtcattactctgccatctcactgggcaggatttctcaaagtcagcaagattgacatttcagtctggataattccttgtcgtgggggctgtcctgtgcattgtaggatatctagcagcatccctggccctacccactagatgctagtagtcttctcctctggttgtgactattaaaaatgtctccagacattgccatatgttccctctggggcaaaaccacccctaattgagaaacactgtcctagtgagttatccttgtctgtatagtcaagacttacaggaagaacttcattgtctcttgtgatttctggttccggatgcccatcaatttgccttctaagcagccataaaaaaagaaagaatgggtcgggcacggtggctggtgcctgtaatcccagcactttgggaggctaaggcagaaagatcacgaggtcaggagcccaagaccatcctggccaacatggtgaaatcccatctccactaaaaatacaaaaattagctgggcatggtgacgcacgcctgtaatcccagctacttggaaggctgaggcaggagaattgcttgaacccggaggtcgaggttgcagtgagccaagatggctccactgcactccaccctgggaacagagcaagatcccatctcaaaaaaaaaaaaaagaaagaaaagaaagagagagagagagtgcgagccgagtgtggtggctcatgcctataatcccagcactttaggaggccgaggcgggtggatcacctaaggtcaggagttcgagaccagcctggccaacaaggtaaaaccccgtctctactaaaaatgcaaaaattagctcgagtggtggtgcgcccctgttatcccagttactcaggaggctgaggtgggagaattgcttgaacctgggaggtggaggctgcagtgagccgagatcatgccactgggtgacagagcgagaccctgtctcaaaaagaatgaggctgcttcctgagaaatgttttctagggtttttgttttttgttttttgttttttttagtagagacgacgtgttgctatgttgtctgcctggtcacgcatacctgagctcaagcaatcctcccgccttggcctcccaaagagctaggattacaggtgtgagccaactatgctgggaaatcagccaaccaacctggctcaggctcagggtcctctcctggtcagccaaccaacctgatttctaggtttttaatcctggtttcatcacctagaatatttttcttgttgaagctactctaaacataagataatgcatgcattgtaagtatatagcttaattagttttcaccagttacatacatctgtgtagctagcacccaggtttagaaaagtcaaacattgccagcaccccacaagccttgcagttgctttgttactttgtctttttattacatccttcagaaattatctagctggagtgtgctgtctgtcacctgactgtttctcaattaggggtggttttgccccagagggaacatatggcaatgtctggagacatttttaatagtcacaagcagtggagaagactactagcatctagtgggtagggccagggatgctgctagatatcctacgatgcacaggacagcccccacgacaaggaattatccagactgaaatgtcaatcttgctgactttgagaaatcctgcccaatgagatggtggcataatgagaaaggagaagcctggatccctgaatgaccacatggaacagagttgcccaccagcctggacccgttgcactgtgtcttctccgttagcctgtggtctcccccgtcagcctgcagcctccccagcccattgctctgagctggagggacagggtgtgcttctacctggggctgtctcctctcaggttgtgtaccagccgcaggaggcggagccgaccacgtccaagtcagagaagctggacccgcggcctttcctgagggtgctggagtccattgaccacaagtacccgcctgaggagcggggtgacctcctcgtcttcctcagcggcatggcggagatcagcgccgtgctggaggctgcccagacctatgccagccacacccagcgctgggtggtactgccactgcacagcgccctgtctgtggccgaccaggacaaggtatcacaggaagcccgagtggggcaggcggggggtctgcatgagtcaggggtggctgcgcacaggacttgtgtaactccacaaacacagggctcgggggctgtacttgtgcaaagtcgtagccacctagtggcagagccaggctgcgaacccaggtagtctggccccggagcccatgctctaaaccagaggtcggcaaactttctataaagggtcggagtagatgatgtcagtcctatcgaccatgggctctctgtctgtcacagctactcagccccactgttgcagcatgaaagcagccataaactgagtgggtgaggctgtgttccaaaacagtttttttttttttttgaaacagggtcttgctctgttgtccaggctggagtgcagtggcacgatcagggctcactgcagccttgacttcttgggctcaagtgatcctctctccttagtctcccaagtagcaactataggtgtgtgtcactaaactccattaatttttttttctttttgggacagagtctcactctgtcgtccaggctggagtgcagtggcatgatcgtggcttactgcaatctccacctcccgggttcaagcgattctcctgcctcagcctcctgagtagctgggactacaggcacccgccaccacgtccggctaatcttttgtatattgagtagagacggggtttcgccatgttggccaggctggtctcgaactcctgacctcaagtgatctgcctgcctcagcctcccaaagtgctggggttacaggtgtgagccactgtgtccggcctccgttaatttttttttgaattttagtagcaaagaggtctcactgtgttgcgcaggctggtttcaaactcctgagctcaagcgatcctcccctagtgggggcagtgccagtttatgcttcagcagatccctctggctgccatgtgagtctacaggccagagatctgaggggaagctggagtaggatcagagtgggcgaggagaggcctggaccagggcaggggctgggctgtcggaggagggaaggatttcaagaaaagttccagatggcctggtacattggctcatgcctataatcccagcacaggaagctgagacaggaggatcactcgagctcaggagttagagaccatcctaggcaacacagtgagaccttgtctctacaaaacggaagaaaactagctgggcatggtggcatgtgcctataatcccagctacttgggaggctgatgcaggaggatcgcatgagctcaggaggtcagggctgcagtgagctgtgatcacgccactgcactccattgtaggccacagagtgggatcctgtctcaaaaaaaaaaaaaaaagttcaagatgttcaggtcgggggagcaggtgtggtggctcatgcctgtaatcccagcacattgggaggccaaggcaggcggatcacctgaggtcaagagttcaagaccagcctggccgacatggtgagaccccgtctctacttaaaatacaaaaattagccgggcatggtggcgggcacctgtaatcccagctgctcgggaggctgaggcaagataattgcttgaacccgggaggcagaggttgcagtgagccgagatcacgccactgcactccagcctgggcgacagagcaagactccgtctgagggtgggggagggcccaggatggcccaggtgatggggtggacggtgagccatctccaaaagggaggtctctgaaggaggaaagggttccagggaagctgctgacacgggggtgggcaagaaattggacacataggttagtcggggctgagttagttcctgacaccaccccctcccttcctcccaggtatttgatgtggcaccccctggagtccggaaatgcatcctctccaccaacattgctgagacctcagtcaccattgacgggatccgcttcgtagtagattccggtaaggaccaccatgagcccctacccaccacccccaaggacttaggagcatggggtccggaggtgtgcgtgtgtggcaggggcgcaccagcttggattgggaagtacagttgactttcccatatccaaaatgcttgcttgcaaccagaagtgtttggaatttcgggtttttttgaatttggaatatttgtatcaattttattatttgagtatgtcaaatccagaaatctgaaatcctccagtgagcatttcattggagggtcacgttagtgctgaaaacatttcagattttcgagcatttcagactttggatttccagaattgggatgctggaagacgatgtgtggggccatggaccaatggcaacatcttagtttttctcacaccttccaagcctgcttctgccctggggcctttgtactgttctctctgccgagagctgtctttctccaggtatccacacaggtgacgccctcacctcatttcagggcccgcataaatgtccacccgtcagagaggcccatactgtccactctgtctaagagatatcccctcctccatccgctgttgcttgtcatatgagggggattgacattctgtttgttgttgttgttgttgttgttgttgttgttgttttgagacggagtcttgctctgttgccagactggagtgcaatggtgcaagctccgcctcccgggttcaagtgattctcctgcttcagcctcccaagtagctgggattacagacatgcatcaccacgcccggctaatttttgtatgtttaggagagatggggtttcaccatgttggccaggctggtctcgaactcctgacctcaagtgctgcctgcctcagcctcccaaagtgctgggattacgggcatgagccaccacgcccagcccgacattctattttatgtgctgctctgtttgctcactttctgtcttcctgactggaatgttctctgggaagtcagcatagcatagtgtttggagacactggagcctgcctggccaggtttagtgctggctgtgtggctggggtcatgtgactgacacttcatgtatcggttggctcatctgaaaaatgacaatggcaggccgtcccggctgggcgcggtggctcacacatgtaataccagcactttgggaggccaaggcaggcaggtcacttgaagttaggagtttgagaccagcctggacaacatggtgaaactccgcccctactaaaaatacaaaaattagccaggcatggtagtgcgtgcttgtagtcccagctgctcaggaggctgaagtgggagaatcacctgagcccaggaaatcgaggctgcagtgacctgtgattgtgccactgcactcaagcctgggcaacagagcgagaccctgtttaaaaaaaaaagagagagagagaaattaaaaaaataatgtctgccaggtgctgtggctcatgcctgtaatcccagcactttgggaggctgaggcaggtggatcacctgaagtcaggagttcaagaccagcctggccaacatggtgaaaccccatctctactaaaaatacaaaaatgacccgggcatggtggcgggttcctgtaatcccagctactcaggaggctgaggcaggagaatcgcttgaactcaggaggcagagtgagccgagattgtgccattgcactccagcctgggcaataagagtgaaactccatctcaaaaaaagaaaagaaagaaaatgtaaaaaaaggttgttctgacactggaggaaatatggtgctctgttcagtcctgtgagactaggacctttgtttagctcactgctgttcccctagtgcctagtgcagtgcctggtatatagtaggtgcttaataagtatttattggataagtgaacctctgaagaaacaaagacttgggaaaataaatgaaaagatgtgtgagtgaaaggctgggtgcagtggcccacgcttgtaaccccatcactttgggagcctgaggcaggcagattgcttgagcccaggagtttgagatcagcctgtgaaaccccgtcactgcaaaaaattagccgggtgtgttggtgtgcacctttagtcccagctactcgggaggctgagctagtaggatcatcgcttgagcctgggaggttgagactgcagtgagctctgactgagccactgcactccagcctgggagacagtgagaccctgtctcaaaaaaaaaaaaaaaaaaaaaaagatgtgtgaggaaatgaaagaataaatgaacaaaatgtcagagttgggcccagaataagccctcagttagcattaacagaataaaggagtaagtgagggtgttggcgagtgacaagagccaggcgcgtggccagctgcacgtggctgccacacacagactccctttcctcattgctcccatccaggaaaggtgaaggagatgagctacgatccgcaggccaagctgcaacggctgcaggagttctggattagtcaggccagcgcagagcagcggaagggccgggcgggccgcacgggccccggagtctgcttccgcctctatgccgaatcggactatgatgccttcgccccctaccccgtcccagaaattcggagggtggccctggactcgttggtgctgcaggtgaggcatgggcagaaaggggactatatcctaactgctggcacagggaggaacctgggaggccttttttattttattttattttattttattttgagatagcgtcttgctctgtcactcaggctagagtgcagtgctgtgatcatggctcactgcagcctccatattacaggctcaaatgatcctcctacctccacctgccaagtagctgggaccacaggcacacaccaccacgcttggctaacttttaaatttttatttatttatttatttttgagacggagtctccctctgtcgcccatgctggagtgcagtggtgcgatctcggctcactgaaacctccgcctcccaggtttaagtgattctcctgcctcagccttcctagtagctgggactacaggtgtgcaccaccaagcccagttaattttttgtatttttttttagtagagatggggttacaccatgttagccaggatggtcttgatttcctgaccttgtaatccaccctcctcggcctcccaaagtgctgggattacaggcatgagccaccgcgcccggcctaactttttttatttttagtagagatcaggtcttgctatgttgcccaggctggtctcaaactcctgagctcaagtgatcttcccaccttggccttccaaagtactgggattacagccatgagccattgtgcccagccagccaggaagcatttacataggacccaaccccagagtgtcagggtcaggaaggatagggctagccaagccactgaggggaacccatcccttccaaatgtcaaaacccttgttgaggggagaattgttccttaaatccatagggtcagctgggcatggtggctcacacctgtaatcccagcactttgggaggccaaggcaggtggatcacttgataccaggagtttgagaccagcatgaccaacatggtgaaaccagtctctattaaaaatacaaaaaattagccgggtgtggtggtgtgcacctgtaagcccggctatttgggaggctgaggcaggagaattgcttgaacccaggaggtggaggttgcggtgagccgagatcacaccactgcactccagcctgggcgatagaacaagactccatctcaaaaaaaaaaaaaaaaaaaatgtccatagggtcaaaggaagaaccagtgactcaatcagaatgctttcagctgtaacaggaaacctagcaggaaagggcttttaaaaccagggtttctcaatacattttatgtcatgatttgtatctcatttgttaatttagcataggttagactgccatgacaaatacacatggtcacgaatggccaacagcggaatggtggtttacaggttggcaggcaattttctttattcagggacccagggtccttcactcttgtggctctataatctccccaggggcttttcctgcatatgtgtccagccagccaaagggtcaagggcatgggaagtgagtacaggagggtttgcgggtcgagcctgcaaatggtgcacttgccttgcactcaccactcctggtcagtcctcagtctcgtggccacgcccaaccgtgaaggaggctgggaagtgtagtccttgtgctcaggaacaaaaggaaaaggaaagttgggagcagctgatggtgtctgccacaggctcacgtgcgggtgtagcacaaaccagtggccttcctgcaggaggtgcacactattttctattctgtttgatttcatcttttaaaaaaaaaaatactagtgctgccgggcacaatgagtgactcatgcctgttatcccagcactttgggaggctgaggcaggaggattgcttgaggccaggaagtcgagaccagcctaggcaacacggtgaggccctgactctagaaaaaatttaaaaattagcccagtgtgatggcacacacctgtggtcccacgcaggaggctgaggcaggaggatcgctagagcccaggagttcgaggctgcagtgagccttgattgcatcactgcactccagcctgagtgatagagcaagaccctgtctcataaaaaaacaaagtccatggggtaggtagtcttaccctaatttttggaccagaagaaggatgcagagagagagaaaatattgccccaggtcacacagctggcaagtagtagagtcagggctccatccgaggccaccaggcgtcagagcctgcttcgtgagtggccgctggctccaggcacagtgggcgtcacctcctcctcctttaccatccggaggcagaagcaaggaactgcccttctctgtgggtctaatttttaaggccacaggaacattttctagactcctctggccagtctctcatcctctcttgtcagcagaaccgggtcatatgtgttcaccctatgccccgcaattgtctagggttgtggcattgcctgagttgatcagagcagtgtctcagccccagctgcatactagaaacacctggagaatttaaaaaaaccccaggccctgccccctgcctctttaaattgagcttctaatgtaaaggttatttatttatttatttatttatttatttatttatttttgggacagagtctcactctgtcgcccaggctggagtgcagtggtgttatctcggctcactgcaacctccacctcccaggctcaagtggttctcctgccttggcctcccgagtagctgggaccacagatgggtgccaccaggcccagctaatttttgtaattttagtagagagggagtttcaccatgttgatcaggctggtcttgaacttctgacctcaggtgatctgcctgccttagcctcccaaagtgttgggattacaggcatgagccaccgcgcccggcctataaaggtttttaaatgagtattgggtgaactcatagacggcatcaaggcttggtcagcagggaggaaggagcagcagctgcttgcaggtggacgccagaacttctagtgccctcggatcaaagccaggcaaacagacttctctgagcttccttctcgctctctggctgtcacatgagctgccttgccagcctctccttcttccagtcaccagagaggtgctgtttgcttacgtatgccacgccagaccccggggtggacatatgctgtcacttaattctcccaccatctactgcctgcctggactgctgcattaattgggattcttttggttgtaagtgagagaaatacaactgaaactattgtaggcagaaagggggatcttaccattttgtgcattcatgaggcggcatgtctaacttaggaacaatccaagaatttctccatctgctgtaggtgggcccatttccaaaaaatggacaaagtcaaaggtcacagcagttctgggttaataagatagccttccatcctggccacaaccagagaggatgctgggaatgctcttcctggctccagtctcatggaaggattctgattggtccagctcaggtcacgtgcctctcctccatggtctggggcaagatgtgctaggcagacagatacagagacagcagccctccttgcctgcctctgcacagtggatcttgacattgggaattttattttattttattttattttatttttgagatagaatctcactctgtggcccaggctggagtgcagtggtgcaatctcggctcactgcaacctccgccttccaggttcaagcaattctcctgcctcagcctcccaagtagttgagattacaggcactcgccaccacacctggctaatttttgtatttttagtagagatggggtttcaccatgttggccagtctggtctcaaactcctgacctcaagtgatccacctgctgtggcctcccaaagtgctaggattacaggcatgagccactgtgcctggctgacactgggaatttgagatggagtctcggtgtattgccaggctggagtgcagtgcagaggcgcgatctcggcttactgcgatctccacctcctgggttcaagcgattctcctgcctcagcctcccgagtagctgggattacagtcatgcaccaccactaatttttgtatttttagtagagacggggtttcaccatgttggccaggatggtcttgaactcctgacctcaagtgatccgcttgccttggcctttcaaagtgctgggattacaggcatgagccacaacgcccggccaacactaggaattttaaaacgtcatgaatttgtgatctctgagccccgctgtgctgcacagtggctcttgtgttccccaatcttgggggttttgcttctcattctagatgaagagcatgagtgtgggggacccccgaaccttccccttcatcgagcccccaccaccagccagcctggaaaccgccatcctctacctccgggaccagggggccctggacagctcagaggccctcacacccattgggtccctgctagcccagctgcctgtggacgttgtgattggtgagtacccacccccctcctgatcactcagggccccaggagcgggtatgggcacagctcactctctgagtggcctgggggcaagtctgtttcttccctgggtccagttcatttattcactcttcactgggccaggcactgttctaggtgctgggcatatagcagtggacagaacagacacaaatctctggcctcagggagctgacattttggtgaagaagaccagcaatacattaggacaataaggaaaaggcatagtagatcagatggtgcctagtgttctggagagaagaaacaacggggttggggaatggggagttgcagtttgtaatacaggcctcatgtataaggcagacctcatggggaaggtaacatctgtgcagagaaatggagatgagggctaggagccatgcaaatactagaacatgcttgccagcagaagtcgagaaacatggccggcacagtggcccacacctgtaatcccagcactttgggaggctgaggcaggtagatcacgaggtcagcagttcgagaccagcctggccaacatggtgaaaccctgtctctactaaaaatacaaaaattagctgggtgtggtggcacacgcctgtaatcccagccacttgggagggtgaggtaggagaatcgcttgaacctgggaggtagaggttgcagtgatgcagtgagccgagaccatgccattgtactctagcctgggcgacagagcgagactccatctcaaaaaaaaaaaaaaaaaaaagcaaaaacaaacaggtgagattcattttgataaaatagctgattcaacctaatatacctaaaacatcacaattttaacataatcaatagaaacatttttgcaagattttatgttattttttaccatacgacgtcttggaaatcttggtttggaccagccatgttcaactgctcagtagccatgtgtggccagaggcggccgtattggacagtgcagatggtgcatgagggtgttcgggcagtgggaacagccagtacagaggccctgtgggggcacatgcctgctgctacaggaacagtgaggagccccgtgtggctgcagtggagtgagagggagaaggtgggagatgtaaccaacagtctcatcattcattcattaaatcctttttttttttttttttttttttttgagactgagtttcgctcttgttgcccaggctggagtgcaatggtgccatctcggctcaccacaacctccacctcttgagttcaagcgattctcctgcctcagcctcccgagtagctgggattacaggcatgcgccaccatgcccggctaattttgtatttttagtagagctggggtttctctatgttggtcaggctggtcttgaactcccgacctcaggtgatctgcccgccttgacctcccaaagtgctgtgattacaggcttgagccactgctcccggtccattgaatgtgtgtgtgtgtgtgtgtatatatatacacacacacacacacacacacatacacacacatatatatacatacacacatatatatacacacacatatatatatgtttttttttctttttgagatggagtctcgctctgttgcccaggctgaagtgcagtggtgcaatcccagctcattggaacttctgcctcctggattcaagcaattctcctgcctcagcctcctgagtagctgagactgtaggtgcccgccatcatacctggctaatttttgttttgttttgttttgagacagtgtttttgctctgttgcctaggctggagtgcagtggtgtgatctcagctaactgccacctcctgtgttcaagcaattctcctgcctcagcttcatgagtagctaaaattacaggctcacgccaccacgcctggctaatttttgtatttttagtagagacggggtttcatcatgttggccaggctggtctcgaagtcctgacctcaagtgatctgcccacctcagcctcccaaagtgctgggattgcagacttgagccaccgtgcccggccagtatttgttttttcagtagagaaggagtttcaccatgttggtcaggctgatctcaaactactgacctcaagtgttctgcctgcctcccaaagtgctgggattacaggcatgagccactgcgcccggccaatatttgtttttttagtagtgtcaaggtttcaccatgtcggccgtgctggtcttgaactcctgactttaagtgatctgcccacttcggcctttcaaactgctgggattacaggtgtgagccacagctcctggcccattcattaaataatttttgagcacctgctctgtgccaggtcctagtctagatgccagagatacaacagtgaataaaacaaaactcctgccctcacggagctcacatgtaacaggggagatggacaggggcagataaatgagtgaaaacacggaatgtcagccgctgattgctgctcaggtggatgcagggcacggtgggcacagtgggggctgggagcagtgttaattggctgtcctgggaggccaattaacagtgacatctgggcagaggcctgaaggaggggaggggacagctgtccctctggccctgggtcaggtgaggagctttgaattaaatgggaagtgtttaagtggaactgggtcctaagtggctgaaggtggccagaaaattgatcagttgacctggcggttctgtgaggatctggaaagggcgggtccacagaggtcgacggagaccattttcagttcccagccctcctgatctcaggtcttcagtagccagtcacaagcagatgtggtgctcctcgtccccacgctgtgtcatcaggaatagggcgttaatcttgagggatttggggccagcagaccctctgaccctgtcgttcttgtgtgcaccgtcagtgtctcaggcactcacctgacgctgcagatgccaccaccagaggctgggtgtggcctgtggtgtctggcttgcaaggctgtttcagagaatgtgacgcaaagtgccctggttgtgcgtgagtgacaggaaagacaggctctctcgcttggattccccagcacttggggtcatgacagggcctcccttgggaggcacaggcaggtggagtacccaagatcccccaaacgcagaaagaagtcttggcttttccacagctcagacccctcccacctctctcctctgcacagcgtgtccccagctctgccccgcacccctctcttgcgggctcaaggatgtcaaaactcttcctctccctcattcctgagtcatgctcacccctcccggggagctcactgactgaggcttgttcatcttgcctgattctcctgactcaagactttctatttccagcagcctgaggcccaccatggcaggaccacccatgtatgtgtgttaacaccattaaagcccccatccttgcagcacagcagggcttcagtgtgggcaggaggctggatccgctggacttggagggctgcccaggctaagaagatggttcatttttgttttatttatttatttatttatttagagatggagtttcactctgtcctccaggctggagtgcagtggcatgatcttggctcactgcaacctccacctcccgggttcaagtgatcctcccacctcagcctcctgagtagctgggattataggcatgtgccaccacactcagtttttgtattttttagtagaaacagggtttcaccacattggccaggctagtcttgaactcctgacctcaagtgatccgccagcctcggcatccctaagtgctgggattacaggcgtgagcccctgcgcccggcttcatttttgttttggaaggaaacagggctagagcagggagaatctgaactgagaagcagaagaatgttctgtgagctcttgctgtgtgccggcgaaaggctctgtggactttccgttatttcatccttacctgctgagggcagggcctctgatcgcccccagtgtgtagatggggaaactgaggctgggcccaggaggctcctgagggcatggggaagcctggctttgatcggaggtgatggtaaatgcctcactcacattatctccctgagggctgggggcaggtgcccccacttgccctgtggggaaaacgaggctcagagaactgctgctcagggtcacagtgggaactgagaggcacggatgaccctgtgctgggcgtcctctgtgccaggtggagttctgaacgcttcacagggtgaaacacaaagcatcctcttggcagcctgaggagaggccaatgctgttgttcccccgtttacagatggggaagcagcgtcacggcgaggtggggccacttttccctggtgacagagctggggtgtcctggaataggacaggggcctgcacagtacagccccaagccctgctttactgccacctttgttttatgaggccagctttttttgtttgtttggtttttgagacgaagtcttgctctgttcactcaggctagagtgtaatggcaagatctcagctcactgcagcctccgcctccagggttcaagtgattcttctgcctcagcctcccaagtagctgggattacaggcgcctgccaccacacccagctaatttttgtatttttagtagagatggagtttcaccaggtttgccaggctggtctcgaactcctgacctcaggtgatctgcttgagtccagttttgtgacaggcactatggaaagtcagtgaaggtcaacggtgggggcgggtcagacacatgacacagaccactagttactggacaggtgggcaagggagcccccagaagtccagcgtcagctcgggcgcccagaaccaggggatgtctagatgcccgctgtggagcgctcacagatggagacagggttcacctgtctccaggtgagactcggccaccctgggagacggttcctgccacttttcctctctgtggcctcccctctgtccttcctcccctttccctacctctcccagcccctgccccatctttctccatgtcttcgccttctgtcccctcttcctcttccacttccaccttgacctaaacaaaggctgcaggagaagattcatcctgtgataagcacaggagtcagtgcctgcctgtgccagggcagagctagagggactcacttacaggtgacactctagcgcggaggagagacgtccaccgtgatgggtcaaaatgagctcctagagcaaagaccaagccagggaagcatcagagcgctgggggagtgggttgtaaatagcaaagtggggaacttggtgacaggagtagtcagcgcttagacagtatctcctgtgtgtccaaggaggcagggactggccatctccaatctacaaatggggaaactgaggcccttgcccatggccacgtgaccagaaagcacagcgcgtgggtttgaatctccatctgggtcacaagacccttagtgggcaagatggagggggtgggagcaggagggcaggcgggagggcaggctggggccccgaggggtgagggctgcgcctgtcctggcacccaggagcctcaaccccgtgtccgccgctgcagggaagatgctgatcctgggctccatgttcagcctggtggagcctgtgctcaccatcgcagccgcacttagcgtccagtcgcccttcacccgcagcgcccagagcagcccagagtgcgcggcagcacggcggccgctggagagcgaccagggtgaccccttcacgctcttcaacgtcttcaacgcctgggtgcaggtgaggctggtggtgggggccctctgtctgtcaccctgctcagggccaaggccttctgtggctgtggctcctcctcgtgtcccaccctcagccccaccctgggaggaccactgagccccccacagactgggcctgcctggggagggccatgtctccatcatccatgctttcggctcaggacagcatgtgcccaggcccggggctgagaggagcctggggtttctgaagcactgatgaaaacctgtgccacctggagaaagtccaggctccttgggaggcatctggagatccagtatatgtcccttgagtcctcaccctaaccctggccctgtagtgtagtgctgggggcccatcagtgccaaaactaccctggccctgccctcccggggttcacagcccagtgcagggagacagaccactgatgtgacagtgacaacccagagagggctggaatggggagtccagggggctgggacaacccagcggggcatctaacccagtttgtgggtagtctgggagggcttcccataggagggggcactggggctgagacctggaagcaggagagcaggtgtccctgagggatgcccattttggggctctgggtgctcggtcagcccctccctccccgcactggccaggccctgacaccctggcgtctgctcctccacccaggtgaaatctgaacggagcagaaactctcgcaagtggtgccgccgccggggcatagaggagcatcgactgtacgaaatggccaaccttcggcgccagttcaaggtgaggctcgggaggaggggtaaggccggccccactcaggcagacgtgtgtaagcacactccagaacactgcttccccttcccagacagtggtcagaccagaatcccaccctgcacccacctcccccaccacccggtgaccaggtgttggggcagctgggcagagcaaagggagcagaaatccaggagggcttcctggaggggtggaccgagtcagtggacatgcagcatcctcgggaagagctcgccctccggactggggatgctgagctggctgcatgggcatggtgttggaggcagcctacggttgtggttggccggcacatctggagccagacacctcagccacagatcccagctctgccatttctgacagcgtggccccgggtgtgttactgcttgtctctgggcctcagcttcccctcgataaaaagagaggataaaaatagcacttgccagccgggcgtggtggctcacgcctataatcctagcactttgggagggcgaggtgggtggatcacgaggtcaggagatcgtgaccatcctggacaacatggtaaaactccgtctcttctaaaaatacaaaaattagccaggcatggtggcacgtgcctgtaatcccagctacttgggaggctgaagcaggagagtcgtttgaacccaggaggtggaggttgtggtgagccgagattgagccattgcactccagcctgggcaacaagagcgaaactccactcaaaaaaaaaaaaaaaaaaagatttgggtttctcctgcgcccacacagttctgcagcttgtttcatagatactgttctccatctgagtgcagacagacctgctgttaggtccttttccatggttgtatccatggattgagaatagaataaaagggttcctggtgtaatccattctgtttggttggagatgggcaagctgaggcccagagggggcagtcacccagccgacacctccggtaccatttctggggtcccggtgttggggaccacagatgccccgattgctctgagcatgggtcccgagttctctctggctgctagagcagtgttcaggcttcattggtccccagatgctttgagaatctaatggaaagtgtgagccctttgcacccacatgcacacatacagacacacatgcacgcacaatctcctgtgtcctccatcggtcagggctcagcaggaaacagaaggtccaaccaaattgggtcacttgaggaatgttgacaagatgtgggcacggggagggcaggggtctcagattttatgggtcacaggcagctggagggtctgttgggtccagatggccaaccccgccgagccccctcctctctccacttggtcgttctgggatgaggcccaggacttggcattcccagcatgtgcctagatgccccagggctacactcagaagcactagtgcaggacgcccaccagggctgtgtgggaaagcagggccccccagacccaaggggcaggtggggcagtcagcagagcctggagccagctgtgggaaaaggcactggacgcccgcacctgcctcctcttgcccctggccccggtgttccctccactgaccagcgaggacagctctctctctggagcagcgatccatgcccagcaccatgcgaggggctgttttcagccccctttgggcactagcagccctgccactgggagggtccccatttccatgagtccagagcccactgagtctgccctgaggccctcacccctacccacctgcccctaggagctgttggaggaccacgggctgctggctggggcccaggccgcgcaggtaggggacagctacagtcggttgcagcagcgccgggagcgccgggccctgcaccagctgaaacgccagcacgaggagggcgcggggcgcaggcgcaaggtgctgcggctgcaggaggagcaggacggcggctccagtgacgaggacagggctggcccagcccccccaggggccagtgatggcgtggacatccaggtgggcgccatgggctgtggggtgtgggggtttaccaaggtgggccttggcctctcctgggggggtcccaggggacatggccctgtcctcatttcaggagccgggtttccatggacggtgcttggtcccaggtatctgcagagcctgggggtctgcggatcatggtaggagcccctcaggtcccctaagactctgcctccccgtgctccccccaggatgtgaagttcaagcttcggcatgacctggcgcagctgcaggccgctgccagctcagcccaggacctgagccgcgagcagctggctctgctgaagctggtgctgggccggggcctgtacccacagctggccgtccccgacgccttcaacagcagccgaaaggactcagaccaggtggggcctgttctgccccatcctatgttttgtcctccaacacacgaaccctgagtgcctgtcctgtgccgggaatgcagtggtgactgaaacaaccctggttctgtccccatggggctcacaacccagtgggaggacagacccatccccagacaacccagagtgggcagggcttggggagtcaagagcactataggagcccacagggggcatctgccccagatttggaggagtcagggagggcttcctggaggagggaacctgggccagagggtggaggagaggcatcctgggcagaggagagagcagataggagggcttgtgctttctctctgtcctccgcagattttccacacgcaggccaagcagggcgccgtgctgcaccccacctgcgtcttcgctggcagccccgaggtgctgcacgcacaggagctggaggccagcaactgcgacggaagccgaggtacagtgagcccaggcggaaggaacccccatccgggatgtgaggggcagggataccgtgaactcccaggcccctctggctggggctcccacaccggcccaggctggtattgacgggggcccacaggaggggaagttccagggccaggcctccctgggtagccttgggtgactcacccctgctgggcctcaccttccgcatggtggtgatagtcaacctaagccagtgtggctgtgcccagagagtgagcaccggtcagggggcctgtcctatggactctgtgagctcccaggtgggtcctgcagagggaggcccccctggcacccgtgtgcatggaagggtgtctcgctgcaggcatggctgcgtgctgggagtcacattcagatttggctgaccttcttgtctgagccaggccaccaaagccatgccgtaagcatactctttctatcgatgtgtactttgaccgggtgggacaggcgggcttctgatgggcctgggtgggccagggtgggcctgagcggtcctcctcaacctttcagacgacaaggacaagatgagcagcaaacaccagctcctcagcttcgtgtccctgctggagaccaacaagccgtacctggtgaactgcgtccgcatccctgccctccaggtgggcctctgccccaccccgcccccatgcccagatatgagagctgcgttgcccagggtggtgggtgggggcaccgcgtgggcttggaggggccacctggcacctgggctggccgcaggcgtcagccttgggccgttgctgtggctgctttttctctcattcatggacttgctcaacagttaacctgccaagtgcctgctgggtgccaggcgctgtgccaggtgccaagggcgcagcagggaaccaggcatgaagcccagcccctgccctctcgggctctagtggcaggggacagtgacagcagtagcacagtgatgccctgagcgacgtgtgggagggtggacacagggtgtggtacaagataaggccacctggtgtccccaggcagagacccaaagaggagagcgtgtggatctcggggcagagtgttccaggcagtggggtggcctgcacagaggctccgaggcagacatgtgcctggcgtgcagtcagcaagggagagcgtgtggagatgaggccagagaggcgagggagacaggaccctggggacttctcagagctgggacagggtcccagccaggagggctggcagctgccaggagggagaggagggtgctgccccggtggaggctgaggccgaactcagatcatggatgcccttgcatgggcaccggcagcagagccatgggccccatggcagccactgccctgcccctagtgctcctcgagcgtctttgtgatcctaggcctggcctcggagtcctcacgcagccctgtgggtctccctttatagaggggactgaagctcaggcaggggcggggatacgtcacctaagtcacacaccgagcaggtggccaagccagagctcctgggtcacactgccccctcctgcctcctggctcactaccagcactccccggcttgggtcccagggaacgtggaggggagagaggaacctgcaggctcctagagcctcagggttttgttgacactgcgattgccaccaacaccacaaaagccagctcagctcagtcacttctgtgtgtgtccacacctccctcgagcccgtctggtgggccaggcactgttagtgttcagtgttctggggccgggggtgcagctgtggtcaatgtcaaccaaactccccaccctcatggggctcagataggatggtagaggcagacggcaaaccaaaagggtgatgccaggtgctcatgtgagcatgggaaagcaggcagcacgcaggccgagggacagaggattggcgaccagccgggccgcaggaagcggaacagacctgctacctgaggcgctctctccctgcactggactgcttgttgagagaatctggccagctcacacctggaatcccagcaccttgggaggctgaggtgggaggattgtttgagcccaggagttcaaaggcagcctgggcaacatagggagactctatctatctctacaaaaaattttaaaaagttagctgggcgtggtgttgtgtgcctgtaatcccagctactcgggaggctgaggcaggaggattgcttgagcctgggagattgaggctgcagtgagctgtgattgttgacactgcactccagcctgggtgacagagtgagacactgtctcaaaaaataataagccgggcatggtggctcacgcctataatcccggcactttgggaggccgaggtgtgtggatcagttgaggccaggagtttgggaccagcctagccaatgtggtgaaaccccatctctactaaaaatacaaaaattagccgggtgggtggcgcgtgcctgtaatcccagctactagggaggctgaggcaggaaaatcgcttgaacctgggaggtggaggttgcagtgagccaagattgcgccattgcattccagcctgggcaacagagtgagactcatctcaaataaataaataaattaataataataataataagaagaagaagatggagaaacttcacattcacataagcaggcagaacagtatatggagccctcctgtaccatccccggtccccaaaccatccacgcatggccagtcctgccctttcctctgccctggccccagccctgaggattttccccaacatcttatgagccacagcactggtaattacagcgctgacttccgtcctcacagaggagcgtgtgctcagggtctgggctctccctgcacgtcgtgtgtgtctgagtgcctgctgtccctctgccaccctgcctgagaatgcagctgtctctctcccagcacgctcccatctgccgccccgccaccccagcccccttccctgactcagcggctgccttgttcatgccgtatccccagcacccgaaggggtgcctggtacagcgggtagatggcgggtaggtggatgcctcacatagacagggctggtgggtgggcaggagcccagccgggcagggcctgtctccaatagcgccctgcccctcccacctactccctgtcttctgccccctctctttcagtccctcctgctttttagccggtctttggacaccaatggtgactgctcccgcctggtggccgatggctggctggagctgcagctagcagacagtgaaagtgccatccgactcctggcggcttccctgcggctccgtgcccgctgggaaagtgccctggaccggcagctggcgcaccaggcccagcagcagctggaggaggaggaggaggatacgccagtcagccccaaggaggtggccaccctgagcaaggaactcctgcaattcacggcatccaaggtaccctccaccagggtgcccgtgcctccctatggccagaaggggcatccgtcactgggcttgagcctcgggaaggcctggcttcccattcactccacatgggcacatttgggggttttcaggccacagaggttcagtcacttacacaaggtcactccactggtctgggtggagctaggatttgatcccaggagcctggttccagaggccacactacccactgctgccttgtttactaagcaccttctgcaagcgtggctgatcccctcttgctaacagtaaaggacaggcagggtgtgagagggaagccgtagacgtctgcttgtggatgggaagaactgaactgagcagacttgaaaccagcccctgactcttaggtggggagtggaaattgctcgtggttctacttcatgtgggtggggtggggagaagggtacaatccaggctgacttcctggagtagaagggcttgaggacaaaggagcaggaacccagtgagccatggagaggggaccaaggctgacatgctaggaggaggaggggggaggtggccagacttgaaggttagactcaaggtctgaatggggtcccaccagtgacaggggcagaagaggggcctggggagggcaatttagatgggggtgggttatcaggtatattctagacagacccctggtcatgtgtgtctgcagccaaattgtgattggtgtaagcacttggctcccgtaactgcaaagcccgagggagggcttcaggcacagctggatccaggtgctttggcggcatctccctgagtctgtctctctccatttcctgtctctccttccttagattccttacagcctccggcggctcacagggctagaagtccagaacatgtatgtgggaccccagaccatcccagccaccccccatcttcctggcctctttggcagctccaccctgtccccccaccccacaaaggggggctacgcagtcactgacttcctcacctacaactgcctcacggtaagcatgaaccctccttccctgaaggtgggatttcaggaagaccccaccaccccgtttcaccttagtccagggacatagttcccaagtggggcccgtggccctgagggcttctgggaagggtcccgggggggcacttgggtggtgggtggcacttggcgggggcccagccctgacagctggcctgccacagaatgacacagacctgtacagcgactgtctccgaaccttctggacctgcccccactgtggcctgcatgcgcccctcacgcccctggagcgcatcgcccatgagaacacctgcccccaggccccacaggatgggcccccaggtaagcacaggactgtggggacccggccacctctgcccagccgtctgcccatcccatgatggtctcctgtgcgtgtgagcacttgctagagcttcgaggactgacgacctccacccgctggccctggctggtgccacacacaggccttgtcctgaagatcaggagcccaaggcagggagagcctggagcgccacctctttctgtctgcctgtcccctgtggtgtctctgtgttgctgtctttgtctctgtttctgtctctctgtggctatgtctcttgttatttttctctgtcctgcagctatctctgccttggtcacctccaccctgttgtcacccagggatgccacacactggggttcagtgggggagatagcactggggccacatgcctccatccccggctggctgtgtctgcctctcagtctccatgtctctccttgtgtctttctctctgtctctctcactggcagggatgcggagtaaagacagacctgtgtatttttattaatctgggagggcttcctggaggaggcaaaactgggttctccaaaggccaggagagaacctgagccccacaggtgcctggcatttgggtgcaggtagacctgtgcactggaacacgcccctcacagcctcctccttttcctcccttaggggctgaggaagctgccctcgaaaccctccagaagacatctgtcctgcagaggccctaccactgcgaggcctgcgggaaggacttcctctttacacccacagaggtgctgcgccaccggaagcagcacgtgtgagctgggccaggagccctgcccacctccgtgcagctgacctgccctccagcccaggactaggggcaggactcttgcctgaacccccagcctgggcttagccctgtggtcctgtcccagtgcagagggcctggagcacggattgtgaataaagcctcacatgctgatacacactgttaggcctgcacctgcccatccagaaagcagcagctgccttgttagtcctccccagggtctagctttccttcttcctgctgcagggtgctgcctgaggggtcctgggtaggaggggcgttagagccagcagggacctcccatgtctccagattccaggtgcaggttcttagcacctccgcagccgctctctcttgagtccatcctcagtctctcctaccccttgaagtagggggaccctgaatttgcccatccacctgggtcactttgagagttgtgcaggggggctgggagcactggtgttcacgtgggaccacaggctgcaccataagacccactcacaataaaaaaataaaaggccgagccgggcatggttgctcactcccgtaataaaaaaataaaagaacaggctgagccgggcatggttgctcactcccgtaatcccagcactttgggaggctgaggcgggtggatcgcctgaggtcaggagttcgagaccagcctggccaacatagtgaaaccctgtctctactagaaatacaaaaacttagctgggtgtggtggtgggcatctttaatcccagctactggggaggctgaggcaggggaatcacttgaacctgggaggcagaggttgcaatgagctgagatcatgccattgcactccagcctgggcgacaagagtgaaactccatctcaaaaaaaaaaaaaaaaaaatcaggctgaggcaggtggtttgcctgagctcaggagtttgagaccagcctgggcaacacggtgaaaccccatctctattaaaatacaaaaaattagctgggcgtggcagcgtgtgcctgtaatcccagctattcaggaggctgagacaggagaattgctagaacccaggaggcggaggttgcttgtgagccgagatcgtgccactgcactccagcctgggtgacagagcgagactccatctctaaaagaaaaaaagaaaatgaaaagaacaataaaatcactcaggagaaaaagaaggcacggcataggaatggaaggaggacaacctgtaggtcctacagatgcgaaaaggagaagagaatacgataaacaacgtgccacacagaaattcactcatttgaaatggaaaaaattattgaaagacactagctacccaaagctcattcaggaagaaatagataaccggaacaactctattaaggaaatgtaattcatagttaacaaagagaacaggctcagatgggctccctggtgacgtctaccaaacatggaaatgatactcgcccacacccacttggccacagcataggggaggacgcctcctgactgatgttatgaggtcagcattatcctgctgctaaaagcaggctatgacaatgcaagaaaagaaaactctaagccttatgaacatagacaaaaaccctaaataggagttcagcacatcatatttagcaatatataaatacagtacatcatggccaactggggcttattctaggaatggaaggttgatttaacatttgaaaatcaatctgattcaccatattagaaacagaaaaaaaaaaaaaggttgggcatggtggttcatgcctgtaattccagcactttgggaggccgataagggtggatcagttgagtccaggagttccagactgggatggggaacatagcaagaccctgtctctattaaaaaacacaaaaattagccaggtgtggtggtgcacgcctatagtcccagctgctcgggaggctgaggtgggaagatcacttggtgtcagaaggcagacattgcagtgagctgagattgtgccactgcactccagcctgggcaacagagcaagaccccatctcaaagaaaaaaagtatataaacccctagtcttagtcagggagatggatttgagagtcatttcccatctccttggctgcacatctcattaaagccttcttcttggcaatactcgctttagtgattggctttctgtgcgaccagcagcaggacctggactgaacccctgatttttggtaacagattccattcaacagtttttttttttttttttttttttttttttttttttttttttttgaggcagggtctcgttctgttgcccgggctggagtgcagtggtgcaatctcagcttactgcagcctccacctcctgggctcaagtgatcctcccaaatcagtctcccaagtacctgggattacaggcatgtgccaccatgcccagctaatttttgggtgtgaataggtttttttgtttgttttttgtagagagtttcaccatgatgcccaggttggtctggaaccatgggcttcctttctttccaaggaagaaggctttaatcagatgcgtggctgaggagatgggaaatcagtctcaaatccgtctccctaactaaaactaggggtttatatactttttttctttgagatggggtcttgctctgttgcccaggctggagtgcagtggcacaatctcagctcactgcaatgtctgccttctgacaccaagtgatcttcccacctcagcctcccgagtagctgggactataagcgtgcaccaccacacctggctaaattttgtgtttggtgatctgcccacctcagcttcccaaaatgctgagattacaggtgtgagccactgcacccggctcattcaacagtatttatttaatttatttatttttgaggcggagtttcgctcttgttgctgaggctggagtgcaatggctcaatctcggctcactgcaacctccgcctcccgggttcaagtggttctcctgcctcagcctcccaagtacctgggattacaggcgagtgtcaccacacccagctaattttgtatttttagtagagacgggggtttctctatgttggtcaggctggtctcgaactcccgacctcaggtgatctgcccgcctcagcctcctaaaaatgttgagattacaggcatgagccaccacgctcagcctcaacagtcttttaaaatgttcctcttgaaggctaacatgcacaaattataagtaaacagcttggtgaattttcccagatgaaacatacctgtgccagcagcacccagataaaaaaataaaacaccagcagccctccacccgctgcagcccagctcctccgtctcccaggagtgtccaatattctttttttttgagatggagttttgctcttgtcgcccaggctggagtgcaacggtgcaatctcggctccctgcaacctctgcttctgggattcaagcaattctcctgcctcagccttccgagtatgtgggattacaggcacccgccaccatgcccagctaattttgcatttttagtagagacgggttttcaccatgttggccaagttggtcttgaactactgacctcaggtgatcctcccgcctcagcctcccaaagtgctgggattacaggcgtgagccactgcacccggccgtgaccaacattcttaatctgtcctctagtgctggccactctaaaacttcacaagaatgtgctgtctgtgtctagcttcttttacccaacatgaggttgcatgggcttggttcattcattctgttccatgaattcatcacaatatatccattcttttgtccagggacatttggcttccagaaacctacccctaacaccagcccttccctccctctgcagaacaaaggccccatcagaggggacgtgctgggtgtcagcgtcagcttctgggaggaggaaggtcagagctaaggcctgaaggatgatgaggtatcaggtgggtggaggggagacgctcaggaggtgggaaaggcggaggtgcacaggcttggttccaggtacaaataacgttactaggagcacacagtacctggattttgatgaatacattgtacatttctgtcctgtatgtatccagggttataggacgtgattataggacacgcatatatgtttggttttagtggactcttaaaaattgttttccaggggccgggcacagtggcttacgcctgtaatcccagcactttgggaggcctaggcgggcagatcacctgaggtcaggagttcaagatcagcctgaccaacatggagaaaccccgtctctattgggaggccgaggcgggaggatcacaaagtcaggagatcgagaccatcctggctaacacggtgaaaccccgtctctactaaaaatacaaaaaaattagctgggcgtggtggcgggcgcctgtagtcccagctactcgggaggctgaggcaggagaatggagtgaacccgggaggcagagcttgcagtgagccaagatcgtgccactgcactccagcctggttgacagagcaagactccgtctcaaaaaagaaaaaaaaaaaaaaaaagaaaacccgtctctactaaaaatacaaaatttagccaggcatggtggcgcatgcctgtaatcccagctactccagaggctgaggcaggagaattgcttgaacccgggaggcggaggttgtggtgagctgaggttgcggtgagctgagattgcgccattgcactccagcctgggcaacaagagcaaaactccgcctcaaaaaaaaaaagaaattgttttccaggccaggtgcagtagctcacacctgtaatcccagcactttaggaggctgaggcgggcggatcacgaggtcaggagtttgagatcagcctggccaacacggtgaaaccttgtctctatgaaaaattcaaaaattagccaggtgtggtggcgggcacctgtaatcccagctacttgggaggctgaggcaggagaatcgcttgaacccaggaggtggaggttgcagtgagccaagattgcactactgcactccagcattgatgacagatctagactccatctcaaaaaaaaaaaagaaaaaaaaaaagagttgtttacatattcctgaaacaagtcgtttgttagatatgcatattgtaaatattttctccaagtctatacttgccttttcatttcattatttctattttttgtagagacaggcagggtcttgctgtgttacccaggctggtctcaaactcctggcctcaagtgatccttccgcctcagcctcccaaaatgctgggattacaggtgtgaaacagtgcgcctgacccatctttatcattttcttaacagtatcttttgcagagcagaatttgtttttttgagacagggtctcactgtgttgcccaggctggaatgcagtggtgtgatcatggctcactgcagcctcgacctgcccgggctcaggtgatcctctcacctcagcctcctgagtagctgggactagacgcacatgctaccacacctggctaatttttgtttttttttgtagagatgaggttttgccatattgcccagcctggtcttgacttcctggggctcaagtgatcctctcaccttggcatcccaaagtgctgggattacaggcatgaactactgcacctgacccacgtttatcattttcttaacagtgtcttttgcggagcagaagttgttgttgttgttgttgttttgagatagggtctcactgtgttgcccaggctggagtgcagtggcataatcacagctcactgcagcctcagcctccttgggctcaggtgattctcccagttcagcctcctgagtagctgggactacaggcaggtgccaccacacccaactaatttttgtattttttgtagagatggcatctggccatgttgcccaggctggtctcgaactgggcttaagcaatcctcccacgttggccttccaaagtgctgggattacaggtgtgagttgctgctcctggacaagagaagttttgtattttgatggaatttcaaattatcattttcttttgtcatttctactttttctgttctacctaacaaatctttgcctaccctcaagatcatgaagttttttcttatgttttcttctagtttaatagttttagatttttaatataaaccgttaggtctgtggtccatttccagttaggcattgtgtatgatgtgagttaacgctcatggctcatttttctgcatatggatgtctaatggttccagaaccattttttgaaaaaagtattcatttccccattgaattaatttaatacctttactgaaaatcagtagactaggctgggcgcagtggctcacgccagtaatcccagcactttgggaggctgaagcgggcagatcacttgaggtcaggagttcaagaccagcctggccaacatggtgaaaccctgtctgtatgaaaaatccaaaaattagctgggtgtggtggcatgcgcctgtagtcccagctacttgggaggctgaggcgggaggatcgcttgaacctgggagcagaggttacagtgagctgagatcgcaccattgcactccagcctgggcgacagagcgaaactccgtctcagagtaaataaataagcaaaaattagcctggcatggtggtgggcacctgtaatcccagctactcaggaggctgaggcaggagaatcacttgaacttgggaggcagaggttgcagtgagctgagccgagatcacgccactgccctccagcctgggcaacacagtgagactctgtctcaaaaaaaaaaagagacagattctcgctttcgctttgtcatctggggtggagtgcaatagagcaatggctcaatctcagctcactgcaacctccacttcctggattcaagtgattctcatgctgcagcctccaaagtagctggaattacaggcaagcaccaccacgcccagctaattttttatttttattattttttatttttttattttttgtagggacaggttttcactctgttggccaggctggtctcaaactcctggcttcaagtgatctgcctgcctcagcctcccaaagtgttgggattacaggcgtgagctaccgcgcctggtcggttcttctttaatttagcaatatttcataattttcagaatacagatcttgcacaaacatagtgcaggcgcccaggccacagtttcccctcaccaggggccaaccattgctgaatcacagagagccctgtgggccgggagtaggcaaggagaatgttgtcatcctcattttgtatggctgctttatcatttgtaaaaggaagttaaggatcgttcccacctcacaagttgttgttgagagttgatgcattagtccacgtgcttagagcagggattggcacataaacggttctcagcaaacatcagctacagtgatcactaaggcaacaggaaaagtaaccaacatttgactgtcactcttcttctgtgacatcagagacaaatagggctacttcccaagtcagcaatatgggtataggttttctctcttacctgctgcacccaatgagtccgtaggccctgtccttcctccctccatcttctgctgtgtgtgtgtgcgcacgtgtgtttgagacagagtcttttactgtcacccaggatggagtgcagtagtgcaatctcggctcactgcaacctccgcctcccagattcaaacaattcttgtgcctcagcctcccaagtagctgagactacaggcatgcaccaccacgcctggctaaactttttgtatttttagtagaggtggggtttcactatgttggccaggctggtcttgaattcctgggctcaagcgatcctcccacctctgcctcccaaagtgctgggattacaggcgtgagccactgcacccagccatgttttgctgtttaccccctgccagttgctgtagcagccacacactgaccatccctggaaggtgacacatgctcattttggtgacaccctcatctccaaaatgcctggctctgtttcccaatatcctttctctcttttttttttttagatggagtcttgctctgtcatgcaggctggagtgcagtggcaccatctcagctcactgcaggctctgcctcctgggttcaaatgattgtcctgcctcagcctcctgagtagctgggattataaatgcccgccaccacgcctggctaatttttgtatttttagtagagacagggattcaccatgttggccaggctggtctcgaactcctgacctcaagtgatcctcccacctcggcctcccaaagtactgggattacaggcatgagccaccatgctgggccccaatatcctttatgcaccttcctgcagtccctggatgagcccctccctccctgtgctcctcccctcctcgccaccctctcgcctccactctgcctccctgtgtaccaaaaccccacagactggatgacttgaaacaacagatctctcacattcttgggggccagaaattggaagtcaaggtgttggctgggctgagctccctcgggaacctgccaggagtcttccctgcctctctctagcttctgtcacactgccggcagtccccttttatagaagggcatgtgtcatattggaccagagcccaccctatgacctcatctgaaaagaccctttttccaaataaggtcacatgcacaggcgctgggaagaggaattagcataccctctggcgggacacaattcaacccatcctaccccgtctaatccactggagggataaagcgctagcccgactctgtcccttctctgctcagagttcttccaggacaatgaaatatcattcagcaatgaaaaggaatgacaggctgggcgtggtgactcacgcctttaatcctagctctttgggaggctgaggcttaagcccaggagatcgagaccagcctggacaacatagtgagaccccatctctacaaaagatacaaaaaatagctgggcgtggtggtatatgcctgtagtcctagctatttgagaggctgaggtgggaagatcgcttgagcctgggtgatccaggttgcagtgagccgagatcacaccactgcactcagcctgggcaacggagcgagaccctgtctctaaaaaagaaacaaaacaaaaaatacacacaaaaaaatggaatgactgacagacactacagcagtgctgcagctggaagacatgctactgaaagaagccagtcacaaagggcagtgtagcgtgattccacttacgtgaaatgtccagaataggcaaacccatggagacagaaaggggattagtggttgccgaggactgggggccggcgatcactgttaggaggttcagagtttcttttggggatgttgaaaatattctagaattgattgtggtgacaggtgcacaaccctataaatacactaaaagccattgaactgtacgctttaaatgggtgaattttatgtatgaatcaggtctcaatgaagctgttaacaaaaagaactctatggctctccagcgccccctggagggatgcaggatcattgccttccctcaaggttccaccaggccggcctcccttccgcggctccctctatcctgtcagggcctgtgcacctccgccttccccatctcctgagcttctcccctccacccacatcacgcctcatcatccttcaggtcttagctcccaccttcctcctcccggaagccgaccctgacgcccagcatgtcccctctgatggggcctttgttctgcagagggaggggaggggctggtgttaggggtggattcctggaattctttttaaaaatgtattatctttagagatagagtctcattctgttgcccaggctggagtgcagtggcacaatcacagctcactgcagcctcgacctcctgggctcaagtgatcctcctgcctcagcctcccgagtagctgggaccacaggcctgcaccaccacatctggctaattgtttaaactttttgtagagacaggtctcactatgttgcccaggctagtctcgaactcctggccttaagagattctcccacctgggcctcccaatgtgttgggattactggcatgaaccaccgcccggccaagtcatagcactctggtggctgctctgactctgctgtccaagcggtaaccacccaccttgcctttggtcattaagttctgtcacttggtccctgccaccctgagatccaattatccccattggagtcaggctttccgattcttgctctgtccacccaggctggagtgcagtggcgtaatctcagctcactgcaacctccgcctcccaggttcaagcaattctcctgcctcagcctcctgagtagccagggattacaggcacccgccaccacacccagctaattgttttgtatttttagtagagatggggtttcatcttgttggccaggctggtctcgaacccctgacctcagtgatccgcctgccttggcctcccaaagtgcagagattacaggcgagagccaccgtgcccaccataatttttgtatttgtaaagagccaggatttcaccatgttggccaggctggtcttgaactcctgatttcaggtgatccacccacttcggcctcccaaactcccactgtaagttctgacctaggaggagcgcgatcgcaacacaacaatgccgtggacacagacacggttgatagagaccagcttgtcacacaatcccaaccctagttcagtcttgtcaggcctctgagcccaagtcaagccatcacatcccctgtgacttgcacgtatacgcccaggtggcctgaagtaactgaagaatcacacaacaagtgaatatgccctgccccaccttaactgatgacattccaccacaaaagaattgaaaatagcttgttcctgccttaactgatgacactatcttgtgaaattccttctcctggctcatcctggctcaaaagctcccctactgagcaccttgtgaccccccactcctgcccgccagagaacaacccccctttttcctttacctacccaaatcctataaaacggccccacccttatctcccttcactgactctcttttccgactcagccctcctgcacccaggtgaaataaacatctttattgctcacacaaagcctgtttggtggtctcttcacatggacgcgcataaaatttggtaccatgactcggatcaggggacctcccttgggagatcaatcccctgtcttcctgctctttgctccgtgagaaaagatccacctgtgacctcaggtcctcagacccaccagcccaagaaacatttcaccaatttcaaatccggtaagcggcctctttttactctcttctccaacctccctcactatccctcaacctctttctcctttcaatcttggcaccacacttcaatctctcccttctcttaatttcaattcctttcattttctggtagagacaaaggagacacgttttatctgtggacccaaaactccggtgccggtcacggactgggaaggcagccttcccttggtgtttaatcattgcagggacacctctctgattattcacccaggtttcagaggtgtcagaccgcgcagggatgcctgccttggtctttcacccttagcggcaagtcccgcttttctgggggaggggcaagtaccccaaccccttctgtgtctctaccccttctccaccttttctagggggcaagaacccccaatcccttatttccacatcccgacccctttcccacttttctggagggtaagaacccccgaaccccttccctccgtgtctctatgctctcttttctctgggcttgcctccttcactatgggcaaccttccaccctccattcctccttcttctcccttagcctgtgttctcaagaacttaaaacctcttcaactcacacctgacctaaaacctaaaccccttgttttcttctgcaacaccgcttggccccaatacaaactgggcaatggctctaaatggccagaaaacagcactttcgatttctccatcctacaagacctaaatattttttgtcaaaaaatgggcaaatggtctgaggtgcctgacgtccaggtattcttttacacatcggtccctttctagtctctgttcccaatgcaactcgtcccaaatcctccttctttccctcccgcctgtcccctcagtcccaaccccaagcgtcgctgagtctttccagtcttccttttctacagacccatctgacctctcccctcctcgccaggccgagctaagtcccaattcttcctcagcctccgctcctccacccgataatccttctgtcgtcctcacacccagggtgtcctcacaccctgtccagcttacagtttagttccacgactagctcttccccacctgcccaacaatttcctcttagagaggtggctggagctgaaggcacagtcagggtacatgtacgtttttctctatcagacctctctcaggtgagtcagcgtttaggctctttctcatcagaccccactaaacatatacaggaattccgatatctaactctgtcctacaacttaacctggagtgacttaatatcatcctgacttctgccctctccccagatgagtgggaaagagtttttctctagcccaatctcacgctgataaccgccggcttcatgagccagacctccaggaaggcagtagagcagttccccgagagggtccccaatggaactatcaggcaaattccccaggtatagctaggtgagattacatggtttcctacctagttgaagggcttaaaaaggcagcttacaaagctgttaattatgacaaacttaaagaaactacccaaggtaaagaggaaaacccagcccagttcgtggcccacttagcagcaacacttagacgctataccgccctagacccagaagggccagaaggccgccttattcttaatatgcattttatcactcagtccactcctgacattaggaaaaaacttcaaaaattagaatctggccctcaaaccccacaacaggaattaagcaacctcgccttcaaggtgtacaataatagagaggaagcagccagatggcaacgcatttctgagttacaattacttgtctctgctgtgagacaaaacccagccatacctccagctacaagaacttcaaaatgcctaagcagcagcagtcaagcattcctacaagacttcctccatcaggatcttgcttcaagtgccagaaatctggccactgggccaaggaatgcccacagcccaggattccttccaagccatgtcccatctgtgcagggacccactggaaggcagactgcccagctcacccaggagccactcctagagcccctaaagctctggcccaaggctctctgactgcttcccagatcttctcggcttagcggctgaagactgatgctgcccgatcgcctcggaagccccctagaccatcacagacgccaagcttcatgcaactctcacagtggaaggtaagtccgtccccttcttaatcaatatggaggccacccactccacattaccttattttcaagggcctgtttccctgccaccataactgttgtgggtattgacagccaggcttctaaaccttttaaaactccccaactctggtgccaacttagacgatactctttaaagcactccttttagttatccccacctgcccagttcccttattaggccgagatattttaaccaaattatctgcttccctgactgttcctggactacagctgcatctcattgccgcccttcttcccaacccaaagcctccttcgcgtcttcctcttgtgtcccaccttaacccacaagtataagatacctctactccttccctggcaaccgatcacatgcccatcaccatcccattaaaacctaatcacccttaccccgctcaacgccaatatcccatcccacagcacgctttaaaaggattaaaacttgttatcactctcctgctacagcatggccttttaaagcctacaaactccccttacaattcccccatttcacctgtcctaaaaccagacaagccttacaggttagttcaggatctgtgccttatcaaccaaattgttttgcctatccaccccatggtgccaaacccatatactctcctatcctcaatacctccctcctcaacccattattctgttctggatctcaaacatgctttctttactcttcctttgcacccatcatcccagcctctcttcgctttcacttggactgaccctgacacccatcaggctcagcaaactacctgggctgtactgccgcaaggcttcacagacagcccccattacttcagtcaagcccaaatttcatcctcatctgttacctatctcagcataattatcataaaaacacaggtgctctccctgctgatcgtgtccaattaatctcccaaacctcaatcccttataaaacaactcctttccttcctaggcatggttagtgtggtcagaattcttacacaagagccaggaccgcaccctgtagcctttctgtccaaacaacttgaccttactgttttagcctagccctcatgtctgcgtgcagcggctgccgctgctttaatacttttagaggccctaaaaatcacaaactatgctcaactcactctctacatttctcataacttccaaaatctattttcttcctcatacctgacgcatgtactttctgctccccggctccttcagctgcactcactcttaagtcccacaattaccattgttcctggcccggacttcaatctggcctcccacattattcctgataccacacctgacccccatgactgtatctctctgatccacctgatattcaccccatttccccatatttccttctttcctgttcctcactctgatcacgcttgatttactgatggcagttccaccaggcctaatcgccacacaccagcaaaggcaggctatgctatagtacaagccactagcccgcctcttagaacctctcattttctttccatcgtggaaatctgtcctcaaggaaatcacttctcagtgttccatctgctgttctactactcctcagggattattcaggccccctcccttccctacacatcaagctcagggatttgcccccacccaggactggcaaattagctttactcaacatgccccgagtcaggaaaccaaaatacctcttagtctaggcagacactttcactggataggtacaggccttttctacaaggtctgagaaggccaccgcagtcatttcttcccttctgtcagacataattcctcagtttagccttcccacctctatacagtctgataacagaccagcctttattagtcaaatcagccaagcagtttttcaggctcttagtattcagtgaaacctttatatcccttacggtcctccgtcttcaggaaaagtagaacagactaaaggtcttttaaaaacacacctcaccaagctcagccgccaacttaaaaaggactggacaatacttttacctctttcgcttctcagaatgctgcagggtacagcctatttgagctcctgtatggacaatcctttttattaggccccagtctcattccagacaccggaccaacttagactgtgcccccaaaaaacttgtcatccctactatcttctgtctagtcatactcctattctccgttctcaactactcatacgtgccctgctcttgttcacactgccggtttacactgtttctccaagccatcacagctgatatctcctcgtgctatccccaaactgccactcttaactcctgaagtaaacaaataatctttgctggcaggactatgctgaatctccttaggcactctctaatcagatgtcctgagtcgtcccaattcttagacattttatacctgtttttctccttctcttattccatttagtttttcaattcatacaaaactgtacccaggccatcaccaataattctaaatgacaaatgtttcttctaacaaccccacaatatcaccccttaccacaaaatcttccttcagcttaatctctcccactctaggttcccacgccgcccctaatcccgcttgaagcagccccgagaaatcgcccattctctctccataccaccccccaaaaaaattttcgccgccccaacacttcaacactattttgttttatttttcttattaatataagaaggcatgaatgtcaggcctctgagcccaagccaagccatcgcatcccctgtgacttgcacgtatacgcccaggtggcctgaagtaactgaagaatcacaaaacaagtgaatatgccctacccggccttaactgatgacattccaccacaaaagaagtgaaaatagcctgttcctgccttaactgatgtcactgtcttgtgaaattccttctcctggctcatcctggctcaaaagctcccccactgagtaccttgtgaccccccactcctgcccaccagagaacaacccccctttttcctttacctacccaaatcctgtaaaacagccccgcccttatctcccttcactgactctctttttggactcagccctcctgcccccaggtgaaataaacagctttattgctcacacaaagcctgtttggtggtctcttcacacggacgcgcatgaaaagtctcatcgtcacagtcaggaacctacacagagacacacaacctataccaaggcacgtgtgacggacaccgccactcagcgacagacacacacaccacattcagcaacaggacacgggcggtgcctccagccacaccgacatccctcaaccactgccctcgaccaccacattccaagtccacaggcccagaggacacacaggggtcagacacacaccaactgcagcccccgagccccgcctgcctatcccctgggtcctcaccccacgacccaggatgcccctgaaccaggggcccctcctgctctgagatgccaacctaccatacacgcaggtccagtggctgcttcctcctctcaggaagtgggggagatatttttagttacaattaacctcccacccaatttcccttctccccaggcacatccaattggtttaattagagatgattaagttaatgagaggcatttccagattctgggaaaagggggaggaggggaagaggagagctgtcccctccccaacttcccagtgtaccagccgctgggaccccttcccagcaccaggcaggggatacactaagcaactgcctcccctctcagccgacctcaaagtcttggcctggccctgcccctcccccatattccttcccccacctgccatcaagggagggtgattgtttgaagtccttcctgctgtccacccatcacccatcccacctgagtcccggggagttttgggagagagaaactctcatcatagtcacgaaaacaatatcaggccaggtgcggtagctcacgccagtattcccagcatcttgggaggccgaggcggctggacggcttgaacccaggagttcaagaccagcctgggaacaccatgaaaagccatctctaccaacaaatataaataattagccaggcatggtggtttgtgcctgtagtctcggctgctgaggaggctaaggaaggaggattgctggagtgttggagtttgaggctgcaatgagctgtgattacagagggagaccctatctcaaaaacaaaagcaatttaaaaaattaaaaatcaggccaggcacggtggctcacatctgtaatcccagcactttgggaggccgaggcaggtggatcacttgaggtcaggagttcgagaccagcctggccaacacagcaaaaccccgtctccactaaaaattacaaaaattagccaggcctggtggtgcatgcctgtagtccaagctacttgggaggctgaggcagcagaattgcttgaacctggaaggaggaggttgtggtgagctgaaatcacacccctgcattccagcctgggcgacagagtgagactcttgtctcaaaaaaattaaataaataaataaataaaaattagaatttcagagaattctattttaagaaaaagaggctggggccgggcgtggcagctcacgcctgtaatcccagcactttgggaggccgaggcggcggatcacctgaggtcaggagttcgagactagcctggccaacatggcgaaaccccatctctacaaaagtacaaaaattagccgggcatgatggtgggtgtctgtaattccagctactcgggaggctgatgtggaagaatcacttgaacctgggaggtggaggttgcaatgagctgagatcacaccattgcactccagcctgggtgagagagacagtgagactccatctcaaaaaaaaaaaaagaaaagagaggctggaagcacagtggttagtgtccaggccctggagccaggctgcctgggttcaaatggagcccagcctcacaatctccagctgtgtgaccttggatgagccacttcacctctctggtcctgcttcctcacctgggaaatggggaccgtgatggcacccacctcctggggctgccatagggtttaacagattcccaggtatacggctcctagaacagagcctgggacacagcacttactgaagggctccataaggtcataaaagtggcagcccatgctctcatcctgtgcctgttctgctttttgtgacactcatccctttcttccttttttgagatggagtctcgctctgtcacccaggctggagtgcagtggcatgatctcagctcactgcaacctccaccttttgggttcaagggattctcctgcttcagtttgccaagtagctgggactacaggcgcccgccaccatgcccggctaatttttatatttcagtagagatggggtttcaccatgttgcccaggctgtgtcctcaagtgatttgcctcccaaaatgctgggatcacaggcgtgagccaccactcctggcctatcctaagattttgttcattcactcgtctgctcagcggatattttctttctttttttcggggggcagagggggacggaatctcgctctgttgtccaggctggagtgcagtggtatgatctcagctcactgcaacctctaccacctcctgggttcaagtgattctcctgcctcagcctgctgagtagctgggattacaggcatgtgccaccacacctggctaattttttgtattttagtagagacggggtttcgctatgttggccaggctggtcttgaactcctgacctcaagtgatcctcccacctcggcctctcaaagtgctgggattacaggcgtgagccaccgcgcccggctgagtgtggcatatcttctgtgcatcctttatgtgtgtgtatgtttccgagtgtgcatgtgcgtatttgcatgtgtgtctgtttgtagcgatgtgtgtctctgtgcaaatctctccatccaggcccaccccaaagggactccgggggtccaggaacacatttttcacggggtccttcaaaaacccacacacgtgccccttgggccttgagcacagagcagcagtgtacgtggttgggggtgcccgagagactcagaggtccaaggatggctctggggagaggatggcaaagggggcgcttggatggcggaggggctgaggggcacttgggagaggggactggaaggcagtgagccaagacgaagcagcccgggtctgaaggaaagagctcacctggcctctgaaggagaagggagggggaggccccgaagatgtgggtttccagtggggaaggggacagagagagacaaggtctgaacaagacagagacagaaagaatggctgggcgcggtggctcatacctgtaaccccagcactttgggaagtggaggtgggtggatcacctgaggtcaggagttcaagaccagccaggccaacatggtgaaactccgtctctactaaaaatacaaaaagtagccgggcgtggtagcgcatgcctgtaatcccagctactcagggggctgaggcaggagaatcgcttgaacccaggaggtggaggttgcagtgagctgagatcccagcattgcactccagcctggtgtgggcaagaaagtgagactccctctcaaaaaaaaaaaaaaaaaaaaaaaaaaaaggtaccagagggagagagacagagccaaacaggggagcgatccacactctgccttggtggtctctctctctggggggtggaggggacagagatctggaaaactgagaaccccaagggactcacactggtttctgagcctcagttttcctagttacaaaggacagcctctgcctgtgatgggcgctgacacacgtggcacagttccccatgtgtccctcgaaatacctccaccatcagcacaatcatcctacgagacaggcacggccgctctccccattctccagatgtggaaaccggggcccagccaggtgaagtcgtaacccgaggtgccatagctgttgcgttccagaggcgagattcaaacccacgtccgtccggaagccttggaagtgagggtgtgcctgcctaacctgctcatttcccatgggacagaggacgtgattggacagccacagctggtgaagtgacgcaggcgtggccctgagtcttcattctcccctgcacacacatctcttgcaggaattctgcagctccctctagttaagaggtggagtcttggccaggcctggtggctcgtttgtaatcccagcactctgggaggctcccaagtagctgaaactgcaggcgtgcaccaccatgcccaagcaattcgtttgcttgcttcgtagagatggggtctcactatgttgccaggctggtcttgaactcctggccttaagtgatccactcgccttggcctcccaaagggttgggattataggcgtgagccatcgtgcttgcagccggccaatcagtattcttattcgtgatttacgagcttcaaattggtaagaatttgaaatcttgggatagacacaagaactccagttggtggctccgtgtttttaagactttatcattaaaaaaaagaagaaattagagaagggaggtaggggggacaggagagtgaaggaatctctccaaaatgtcggatccgggcgaccctccttccctgactgcccagccaccccgtcccttctctgtcctggcggcgaggccctagccgccatcttctggggaccaaggcccaggagcccagctcgggtcccaggcagaggtgaaggcagaagtggggctcagggcctggaggccttgccggtgtccttgagagcccttggatgggcactcaggcccccatgtcccagcagggccctagggaggtaggcattgagcagaggggcctttggaggtggggtcctgaagctggaggaccaggcgggaaccagaggcaggtgtgaggctgggggtcacagccggaggctgggtctgtggagaggggaggagaggccaagtcaggagcgggcagggggcctggccccaccccagcccatctgtgcaggcctcatcagccccaatgtgagggggacacagagagagtggctggcggggaatggcacagggatgtgggagggtcacagagagaagagacgcagtgacgagaaagagggagacagagaatcagagtggaggtgagggagggagagacctacagacagagacagagaacaaggagagagacaggcagagtaggacagagacagacctggagggagtcagagagaacgacatgggaagagagagaagaagtcatgaagaaatagacgaaatggagagagagaaagagagacaggaggctgggcgcggtgactcatgcctgtaaccccaacactttgggaggcagaggcagggggatcgcttgagcccaggagttcgagaccagcctggggaacaaagcgagacccgtctctacaaaaataaaaataaaaattagccaggtatggtggcgcacgcctgtagtctcagccacttgggaggctgaggccagaggatcgcttaacctggggaggtcgaggctacagtgagccatgatcaggagtggagagacagaaaaggagacagaaaggagcagagaaaagagcccactgggcagccaggcagtgggatgagaagacccctccatcactactgaccccaaaggtcccctgacactcaccccagaccatccctacccacacttggccatgaaagagctgagtcgcccactgccctacctggcctggatacgcctgcccatctctctcccaggctcggcctccagcacccgcctccatgcataagccctgtgcaggcctccactctcatccccagggcttttctgctggccctgaattcattagccacctgtccggccgcctgcctcaacccagtccaaagagaacttcctccttgtgtgtagggggctggggctgtctcacagccacgagatttccaagctctcctggccttggcacgtgctattccctctgcagatgctcctctcctgcttcactcctcccattctgctggtctcacctccaaagtcctctcctccaggcagccctccttgaatcctctagtctgggtcagatgccccctcctccaggaagccctctctaaacacctccccccatcccaggtccaacacccgccccctgtgagctcctccagttccttggcttcaccatcccagccctgcccgttctggggcatcaccatctggggatgggtctgtccccttcactagactttgtgccccatgagggcagggctgaggctgtcatggtcactgttgtgtccccaacattacccagcacagggctgggcacagaggggctcaggggatggatggacagatggatgctaaactaaggagttaggactttgtccagatggcactagggagccacaaatggtttaatccagagagagtcaaactctgatctgggctttggaaactctaggctgcctccctaccctgggcctttgcacatgctgttccctctgcttttgtgagcagggtagacctgtgcaagtgacctcttctctctgaacctcagtcttcttatctatgaaattaaaattgttaatagtctcccctttcgggatcgttgtaaggactaaatgagaagatgctctaaagtgccgccatcataccaggccacagaagactcaaggcctgggaaagtcaaataatgccccccttccacattactccctactctgcccagtggactcctattcatccttcagtgccccatccagaggccacttcctctaggaaatcttccctgataccccagagatagctgatgactccctcctatggggaaactacgttttattgtttgaactgttacactggattgtcactggggttgccaacttccccacaagaccagaatcttctcaagatccagaccctacctgaggcatgtcaggatggagtgagggctcaatttttttttttttttttttttagatggagtctcactttattgcccaggttgatcttggctcactgtaacctccgcctcctgggttcaagtgattctcctgcctcagcctccagagtagctgggactatgggtacatgccaccacacctggctaatttttgtatttttagtagagacagggttttaccatgttggccaggctggtctcgaacttctgacctcaggtgatccacctgcctcagcctcctaaagtgctgggattacaggcgtgagctaccgtgcccagccaagggctcagtttatgtttggagatgtatcatagatgaatgggtgtatgtaggtatggatggatggatggatagtgggtggtgggtgggtggatatatggataatgggatgtgtgggtggatggatgggtgagttgatgggtaggtgggtggaagcctgggtagggaggtgggtgaatgcacagataaatgggtagatgtgtgggtggttggtcagtgtggaggtagatggatgagtgggttggcgagtggagagatgaatggagtgagtgggtgaatgtgtggtcagatgggtaatgagtgggtaggtgggtggactaggtttggatggatggattgcgggtgaatgagtaattgagtaacggatggataaagatatggatgggtgagtgagtgggtagatggatggatacatggaggaggaggatggatggatggatggatggatggacggacggacagatggatgaatatcttcccatcaagcctcagagaacccacagtacagggacccaggctgacccactactctggaagtgcccactcttggagtcctgaggtctaatggaggtttgagaattgcacaatccccagcccttagaccctcacacctctcctgcatcagcctctatagataatgccattctccttccaagttcaaactcatccccactgatcctggaagacaaaaaaaaaggagggtaagtgcgtctttcagagacacccccagatgcctctaagtctccctcaccccttcctacaccaggggatccctctaccaggatagactgagtcataagaaggtgctggccctttaagaaaaagtggagccttccgaggtattgggcttgaagtctggaagaaatgaggttgtaaggaaaagatgggggaccaggaaatctgccttggcatcacctgcttctcactaggcaagtgacacactgtattccgcttgaattgaatctcaggtgggcatctttgttttacaggtgggtcatggtgcgcaggggcggggcctagctaagggggcgaggcttacccggaggccggacggccacgtgtggctgcgtctcggtatagcccccgatgggctggccctctgggctgaaggctgcaccctgccctgcgaagggggttcagaggtgcaggctgagccccaggaagcccgggacccggctttgacgccctcctaagaaccccaggctctccgtccccgccttccccctgtacctgtgcggttggattgatcgatcataggttgcacgatgcgtctccgggcgttaatgaacctgggaggcggtcatggaaacggaggggaatgaaaagagggagtgggagagaggccaagacgaacacagagcgggccggaggacagcggcgggggaggcagagcggggcgagcaggggcagtggctctgcggggctcggggcctccgtcagcaccgcggacagcgcccgggctctcgccccgggccggcccgcgggccctcctgggccactcaccagttgttgacttgcaggatggtgagccccgtgtcctgcgccagctgtttcttctgctcctccgaggggtacgggtgctgcagccaccagcaagagtcactctgcctgcctggccggccgcagtctgaaccccaaggtctggcccaccggggtccgggggatggggagcccaggcccaggcagacgtctgggagaaccggcgcttctgagcgtctctgcgctccccaggatggagaccaagggagcctcaggcttggggcaattacatgcctgccagcccccgcctgttccagcaattagaggttaactggccagctctgattagagagactgtgttgggggagggggctcctgtggcgtgggggaggggcttcactggcgtcggggagggaagcaaagcccaggccctccctctctgaatctgtcagagtctctgtgtggccctctccctatccatttatttatttatttatttgagatggagtcttgctctgtcgccaggctggaatgcagtggcgcgatctctgctcaccgcaaactccgcctccggggttcaagggattccccgcctcagcctccccagtagctgggactacaggtgcgcgccaccatgcccgactaattttttgtattttagtagagatagggttttaccatgttggccaggatggtctcgatctcctgacctcgtgatccgcccgcctcggcctcccaaagtgttgggattacaggcataagccaccgcacccagccctccctatccatttctttctttctctttctctcttttttttaaacagggtctcactctgtcactcaggctggagtgcagtggcgccttcatggctcactgcagcctcaatctccctggctcaagcaatcctccggcctcagcctcctgagtagctgggatcacaggtgtgtgccaccatgcctggctaatttttttttttagagatggggtcttgctatgttgcccaggctggtctcgaactcctgggctcaagtgatcctcctgccatggcctccgaaagtgctgggattacaggcatgagccactgtgtctggccctccatttctctctttgtggctctcacattctctctctgactcactatctctgtgtgtgtgtgtttctgtctgtatctctctctctctctgggattcagtccgtccctgcctccgagtttctgtctgtctctgtccctctgtgactcggcctctccctgtctccatcttgctctgacttggtcctccccgaatctctgtgtctctctgttttagcctcttcctggctctatttttctcctctgtccttgaagcagtatggtgcggtggttaaggccagactgcctgcatttgaatccacttctggctgtgtgaccttaggcaagtctcctaacctctctgttcctcagtctcctcctcacctgttaaatggagataatagtagcccctccctccgagggtacactgggtggatggtgggcaggtggatgattgatgcgcgggttaatggacagttttcggggaggacttagtgagttaagtgtcctgagcggcacctgcactcaggtgacactcagtgctgctggctcctgtcacaattctccacctccatgagagtctcgaaaaatttcctgccgtctttctcccacttctgggtttctctggggtttcggtctctgtggtccacccttctccctctctccattcccaccctgcacctgggcagcagggctctcaccgagaggtgctggaacaaccaggctcgcatgatgttggtggccaccttggggaagatccccctcttcttgtttcgccgtcgctcctggtccaagtcctcatcttctccaccagaactgggagaggccacgctggtgtccagcccgtctcctgagggaaggcaggcatgctgtgtgtgtgggtagtgaagagtggaggaccagagggccccagaactctcccccaagacaacactccacaccccagccatctctgcccctctacaagtcttacttgcgatctaacttcaatcctctggttgactcccatgtttcccttccacctcccaagattctcaccttggtcactggagttgtccccactctgggaggccaggcccccactggatggacctggggtccccaaatgtacagacccactatcctcatggtctcgaatccacatattattctagaaaacaagagttagaagttagtgccaaggcggccgggcgcagtggctcacgcctgtaatcccagcactttgggaggccaaggcaggcagatcacaaggtcaagagatcaagaccatcatggctaacatggtgaaaccccgtctctactaaaaatacaaaaaattagccgggtgtggtggcatgcacctgtagtcctagctactcaggaggctgaggcaggagaatcgcttgaacccgggaggcagaggttgcagtgagccgagattgcgccactgcactccagcctgggtgacagagcaagactccgtgtcaaaaaaaaaaaaaaagttagtgccaaggctttgggcatggactctggagctaggactcctggatgggaagccagtccctgcctccttcctagctgtgtgatcttgggcaggtcacttccccactctgagcctccgtttccttaactggaaaatgaaggacaggaccaggcacggtggctcacgcctgtaatgccagcacttttggaggctgaggcaggcagatcacctgaggtcgggcatttgagaccagcctggccaacatggtgaaaccccatctctactaaaaatacaaaaaccaggctggcttgggcacagtggctcacacctataatcccagcactttgggaggccgaggcaggcggatcacctgaggtcaggagttgaagaccagcctggccgacatggtgaaactttgtctctaccaaaaatacaaaaattagctgggcatgatggtgggttcctgtaatcccagctactcgggaggctgaggcgggagaatcgcttgaacccgggagggggaggttgcagtgagccaagattgtgccactgcactccagcctggccggggtgacaaagtgagactacgtctcaaaaaaaaaaaaaaaagaaaaaggaaaagaagggccgggcgcgatggctcatgcctgtaatcccatcactgtgggaggcccaggcgggtagatcacaaggtcaggagatcgagaccatcctggctaacatggtgaaaccccgtctctactaaaaatacaaaaaattagctgggcgtggtggtgggcgcctgtagtcccagctactcgggaggctgaggcaggagaatggcatgaacctgggaggcagaacttgcagtgagccgagatcacaccaatgcactccagcctgggtgacagagtgagactccgtctcaaaaaaaagaaaaggaaaatgaaggacaataatagtcctgacagtgtgtggccagtattcaatgatgagtttgtctacacaggggctcaaacaagatgaccttacacaggtctatggcatcttatctaaaatccttggggcaagaagtgtctcaggattccgaacatttcacatttttatctttatttttagtcagtgtctcactctgtcgcccaggctggagtgtagttgcatgatctaggctcaatgcagcctctgcctcccaggttcacgtgattctcatgcctcagtctcccgagtagctgggattacaggtgcctgccaccacacctggctaatttttgtatttttagtagagacggcgtttcaccacattggccaggctggtctcgaactcctgggctcaagtgatccacccacttctgcctcccaaagtcttggataacaggcgtgagccactgcgccaggcccatttcacatttctaggcaataaatcagcgcatacaccatgcagttcgcaaccatcctaggcagggtctggggcacaacctcgtcatcaaactcatgaacatttccatagcaacatggatgagtatttaactaagtggaataaataaaggctataaatagcccctcattagttcaggtcagcttttgctgccaaatgagtttgcactaaatttatgggacaaaatccaaaactttgaagtttcagagattctggggtctcagaattgtagctaagggggtctggggctgtattatctttttcttttcttttttttttttttttgagacggagtctcgccctgtcccccaggctggagtgcaatggcatgatctcagctcactgaaacctatacctcctgggttcaggcgattctcctgcctcagcctcccgagtagctgggattacaggtgtgtgccaccatgcccggctaattttttgtatctctagtagagatggggtttcaccatgttggccaggttggtctcaaactcctgaccttgtgatccacccccctcagactcacaaatcgctgggattacaggtgtgagccaccgtgcccggccttatcttttttttttctttgaagagacagagtcttgctctgtcacctaggctggagtgcagtggtgcaatcttagctctctgcagcttcaaactcctgggcttaagcaatcctcccgcctcagcctcccaagtagctggaactacagttgcgcctggctaatttttcttattttttgtcgagatgggatttcacagtttgtccagactgctctcgaactcctgggctcaagcaatcctcctgcctcgacttcccaaagtgctgggattacagccatgaagccactgcagccagcctcacagtttctttatgcaaactccaacacactttgaggaactcaacaatcgggtaggatttaccctctacccagatctgtgccccaggaggtcagctcacccatatggactgcagtaacagttctttgtttttcagtttaacgttgggttaaatctgccaagtggttttagattaactgtattcttctaccaaaaatcttagccgctgtcaagcaatctgctcctctctccagttctggtgaccacgcctcctcccacccttcttttttttgagacagagtatcactctgtcgcccaggctagagtgcagtggcgagatctcggctcactgcagcttccgcctcccgggttcaagtgattctcctgcctcagcctcccaagtagatgggactacaggcgcacgacataacacccagctaatttgttgttgtttgtttgtttttttgagacagagtcttgccctgtcacccaggctgaagtgcaatagcgcgatcttggctcactgcaaccttcgcctcccgggttcaagcaattctcctgcctcagcctcctgagtagctgggatcagaggtgcgtgccaccacgcctgtctaattttttgttttttttatgtttagtagagacggggtttcaccatgttggcctggctggtctcaaactcctgacctcgtgatctgcccacctcagcctcccaaagtgctgggattacagtcgtgagccactgcacctggcctaagttttgtatttttagtagagccgggtttttgccatgttggccaggctggtcttgaactcctgacctcagatgatctgctcacctcggcctcccaaagtactgggattacaggcatgagccactgcgcccagccatcaccagtctacattttcctttctgtgactgcagtttgaaggtttggttgtcctgtttgtgacactgttgttgcgattcctgtgcgagtgggtataaggctccaggacttggccggctgcagtggctcatgcctgtaatcccagcactttgggaggccgaggcgggaggatcacttgaagtcaggagttcgaggccagcctggccaacatggtgaaaccccgtctctactgaacaaaaattagcccggtgtggtcgtgggcacctgtagtcccagctacccgggaggctgaggcaggggaatagcttgaacccaggaggcagagcttgcagtgagccgagatcgtgccactgcactccattccggtctgggtgacaaaacaagactccatctcaaaaaaaaaaaaaaatgtctccgggactgtgtctgggtgggtctggctgtggcgtggtcgtcataggagtgtatctgaggtggtgtggagtgggtgtgcgtgtgctgtgaagatgtcattgccaggtgtgttcacagtaggattgcctgagtgtggctctcatgcgacttctcaaggctttgcccctgtactctgtatggagctgtggcaagtcgggatccacacggctgtgctgtgtgtgttttccgtctggtgtcctaagtggataaaactgtagtgaggctgcgtctgagatggtgccaccttactgagttgctttgctgggtttgattctttttttttttttttgagatggagtcttgctctgtcgcccaggctggagtgcagtggtgcgatcctggctgactgcaagctccacctcccgggttcatgccattctcctgcctcagcctcctgagtagctgggactacaggcacccgccaccacacccagctaattttttttttttttgtatttttagtagagacggggtttcaccgtgttagccagaatggtcttgatctcctgacctcatgatccacccacctcagcctcccaaagtgctgggattacaggtgagagccaccgcacccggcctgggtttgattctttgtggccgcatctgagcctgtgagtctatttccaagtctgcgtagatgagtctggggccatgtggctgtgagtggtgtgtgcgtgtgatctcggctgcagcccgactgtgatgtggccagggtcacgtgtgtgcaagagggcaccgtggtcagtccgggcccaagtgtggttatatctgagtttgccgggcagtacctggggctgtttggctctatgtccatctgtgtggctggagcgggtgtgtgtatgcagtggacacatactcaattgagaacggcgtgcggaacccggctgtgtgttctatgctgctgtcgtatggctgggctggggggcgtgtgtgagtacccggtggacgctactgtctggctgtgagcagaaatggctgttgctgagttggtgtggctgtatgtggacctgtgtgggtgtagctgaatctgtgggtggcatctgcagccgctggtgtgcgtgtgtctgtgcactgttgcccagccgcatccgagtctgcgtagctgttgtgtagtgggtgtgtggctgtgtgcatatgcgtgccctgtgatcaggctgactgtggcttcgtctgaggctgtgtagtgcacatgcgccctcatgcggtgtccaggcacagctgtggctgcaggacgatgcctggtgcccgtcccgggcccacctggtctgggaggctggggcaggaggctgggtagtcctcgaagtcctccctgcagccgccgtcccgatcctcgatgaccaggtcgatgggcatctttcccttgaggcaggtgatgtagcggtgacagaagttgtcgcacaggtcgtggacctgggggggcaccggggtactggggggggccacccacgggggcagggcgggggtgctcagggacgggggcggcattctgcttcaactccggtggggagagagctggaaggtggggggcagaggcgacgagagggggtgggatgacaggggcaagtgagggtgtggggaggtgagacgcgctcaccttctccagctccagcaggtggaaccgcagcacctggatggcctggatcatctgaaaacgtgggcgggaggtggggggagacagagggaattgggggagggagcagggaggaagaaggaagaggaagagaaggaggaagaggagacacagagaaacagaaagagtgagacaaaatgacagggacagggagatgcagcaaagagagacaaagacaccaggtgcaagggggaaagagagaacagagatgcagcccagaattaaggaaagagcagatgttagattgagagaagcaagagacgaaaaaggacccatcacaagcggggagagctaaggtgagccatgctgactggcattcccatcctctgcctgttggcccccagctccaggccccacccacctgcaagctacatttcccagaacacttgccaaagggtttggccaataggaagccctggcaagagcttggggagcaaaggatgggagaagctgggtattcctccctcctttcttctctctctctctcttttttttttttttttttgatatggagtcttgctctgttgcccaggctggaatgcagtggtgtgatcttggctcactgcaacctctgcctcccaggttcaagcgattctcctgcctcagcctcctgagtagctgggactacaggcgtgcaccactgtgcccagctaatttttgtatttttagtagagacagggtttcatcatttggtcaggctggtctcgaactcctgacctcaggtgatctgcttgcctcagcctcccaaagtgctgggattacaagcatgagccaccgcacccggccctctttttctttctttctttctctttctctagctctctatgagagacagggtcttgccctgttgcctgggctggtatgcagtggagctgatcaagggtcactacagcctcgacctcttggggctcaagcgatcctcccgcctcagcctccaaagtagctgagaccacaggtgcatgccaccacaccccgctaattaaatgtttttgtagaggtggggtctcgctacgttgcccaggctggtctcgatccctggcctcaagctatctcctggccttggcctcccaaagtgctggcattacaggcgtgagctgccgcacccagcctcctctccttgggcagcagtccctgcgctcactttggcataggtgctgatcttctgacggatggaacatcagacactttttgagccctattctgtgccaggtgctgttccacgcacttgaatcgcattcactcattaaacccccacagcagccctccaagacagacattactaccagccacacttcacagacgggacaccaaggcacggagatgcagagtgacttgccctgggtcacagagctggtgagtggcagagctgggatttgaactcgggccatgggtcccgttctcagactctaggctgtaccacacggcacgtgggcaacaatcatgacggtttggggacatggaccaggtggccttctctctgcaccccccccaccaaccccagggatggggcgtcagggaaggagacccattggaggagggggtgtgggggagggctcgggtctcaccagattgtccagttctgggttggaggagaagaggggcctctcagagcgaacctgggagggaagagagaggccggcagggggatgtcccgccttccacccacccctcctcgctggctctctgactcggtgtgtggtgggtgggaggtgcccacctgcttggcaaaggcagcgatgtcctcgttgaaggaatcagaggagcagacgtcacctccagggggtgtccccagcccagctccggccccgtcacggggagagcatgtagccagttcacatttctcaaagaccagggccaagagggggaagagcgggtgtctggggaggcaggaaaggagagaggttgagggagaggctgggaggtggatggaggggctgccaagatgcagaacagctggggaggggacaagagacccagagagggaaggagacagagactcgtacacagagagagacagaagcagacccagggagcaaagaagcagaaagacagagagagagagacaggagcctgagacccggccccactcacccatagatctcatccttctccctcttcaggccgtcgctgtccaagcctgggggcaggggctggggaggccggtgcgggccatagggccctggtactgcgggcactgtctctgggaagctagccagggctgcggggccatccacgatgcctgggtagtgcggcagctcatcatactgggggaaggtgagaagagaagggcggagccccagggaggggtcagcaccccgagactcggctgaggagcttctctatcctggaacccaggagatgcccttctgtgtcccagaaacctgcctgtggtccccaggtgtctgagcccccaagcttgaagccctccaggtcccctggagctgcctcggtggggagtgaggaccccgtccaggcagagattcctgacatgtgggcaggaggacccagagggagagacggcagggtctggctgggagggaaaagagatggagaaagtggcgtgagaagacagtgacagagacagagagagagacagacagagagggagatccatggacacctcctgtaggaaccgcgcattgttgtacacaaagtacacatacgaagcctccctgtcttctatttcatttcacagttggcagataagcgcatcagagtaagtctcaacaacatgtcacactccactcgccacgtgaatctaccacacatgtagacacagccatacacaccaacccacgtgcacactcatgtgtcagtcacacccaaatccccccccccacacacacatgcacacacacatgcacacagcccaacaccaggcacaagaatgaatgcatgattgagacatttggcacatggatgaatgaatgaatgaggcatttagcacagggcctggctcatgctgtgagcacttgttgccggagagggtcactccgcaccaccatacagacacgattgcgcacccaagagaaacaccattatggggtaggacgaccgcgtcctgtcgtcacagaaccatgcacctgggaagccaggggcaccttcctctcatcaggtcaaatcccttcctcagtgatgaagacacggaggctcaaagaggcagcaggactcgcacgggaagaggctagaacgttcctgcctcggaccctcgcctggctgggcaccctggttctgtgtgtcccactctttccctctccctcttctcctaacttctcctgtgccctgaagttgaatccaactgctccccgctgctcaaggcactctcaccaaaagcggtcctcacagcctacccggaacccccaaaacgggcgcgcgcctcctcccctgtcttctatccccgttcccatccccagggagacaggctccgtggggccagcagcctggtgagaccacctctcccacccctgtcccactcctagccctggagaggcaggggcggcttggaacaaaagtagagcgaagggaaggacggaggagagcagaaaaaaggggggacggtgaggtgcgggcggctgagatggaggaggaagcccaggaacagaggagagagactgcgggtgggggagggcagagagagggggatagagaggcagaaagaggggggagaccagggacagagagagggggacagagaggcagaaaggaggaggagagtggggcagacagagggggacagaggggcagggagaaggagaagctaaacgatggggaggaggcgaggccgagggccaggaagagacacttgggggcagagagggggcacacagggactgggagacccaggggcggagggaggggcagagagagagcgaggtggtgtagaggacggatgggctaatgggggccagcgccggagagtgggggatgcagggacagggggtgcggaagcggccgggacgcggggtccccgccccgagacctaccctccgggccatgggctgaggccggcggcagctcctgggtccctccagagcctggccgcgggggagggcgcagcccggggccgcagcccctgacggcccgcggtgttgacgccagggggtgggcaggaggccaggcgcgcgcccccccacccccgccgccgtcagcggcaggcgccgggccgggtggggactccgcgcatggaccccggcccccgcccccagcgggggtcacggccaggagcgcatcgccgccggggcgggggcagcaggcgcaggcggggcgcccgaggccccctcctctgggccccccccgtcccttccccggctctggagggaatcgaaccgtcccgagacggacacaccggggaccgcagggggcggggggcggcccggggcgacggagggtccggcggcggctcaggggtgctggcagccgcgctccccgttcccggtctctcccttgtcttgtggaaattaaacagaaccaccaaggagcgggataggggatgagccagagtgagcctgcagagctacagcacgagggattggggttagggcagcagcagcacttccggtgggagtcggggaggggcaggctgtggggggaggagaggaagagaccgcggccctggtgcccccaggcccctcctctcctacccagggctggggttcctgctccgggtttctcagtctccctctttcccagtctctctctccttgtctctctctgtctccgcttctcccgtcctttctctcctctggctctctgttctccgagccccctggacacaccacggaccccctccctggccatctccaggggtcacgtgggaatctggagtctggtcccaccgtaggctctcccctctctgaggctcgattccccctctgcaggatgggcagtgcgctgggggcggcgggggtgggctgtggataacggagaaacagttaagctagagggtgccaggactcagggtcttggctgagtctgggggtccccatgccggcgggctctgcccccgtggctgtcctgcggtgaggctggccgtttaaggcagtccgaggggaagggtctggaggccttgcctttcctcaaggccggcgcaccccagataggggttttggagcagaaaattaatttaaatcactttttaattaaagacacaaggccctttggtctgctccacccccacctcaccctcagccaagacttggggtgagggatgcaagggttaggagtctctggctctatttgcttttttggggggtggtgcatgctaaggtccccttagcccaggctgattctgaaacctagaggagcaagtgcggcctcatctgacggccagtggtggggggcgtggacagagcaggaagggagggagggggcacctgggatggggatggggcctaactggagtggggagggaggtaactccagtgacggtgtgattcagagagagagagagacagagacagacgcgggtgggaggagagagagagagaggtgcagacagagtgagacagacaggagggggagggagtgggggacaggagctccaatagagaccctggagtcgtccctgccacccccaaaacaagagcagggggcttggactctgaagcataaatctttctaattaaagaaagagacgagctgttgggaagggagaaataagtgtgtgggagagaaattgattgggggaggatggaggatgccggcgggggacggagggagcaggggggaggctccggctttctgaggctcttcctccagtctttccctctgtctgtccatccgtctgtctgtccgtctctgtctctcgctctctctctctctctctcacacacacacacacacacacacacacacactctctctctctctctctctctctctctctctcttcctggctgtctcccttaaatagtcctgggacccttctgttcccagggggagggagcaggtggcggccaggcctggtgctggagcgggggtgcctgtgtcactgcgtcgcggctgcctgtcggctcttcgagggtgtgcttgggcctccctgtgacagtgtctggaagcgtcttccctgcccggctgagtggctccctgggtggcatcagagtgaccccagctcccagtctgcaggggtctccgccctctagccctgtcctgcacctgttttacagacgggaagcgtggagccctctatgagtagatctgggggacctcatgggtctccccagcacgggctgggcgatctctcagcggactggcccttcagtgccccaacctgagcaccgaccactggggctatgcccaccaggcagccacgtcccccggggatccgcagtggtccccaggatcccctctgaaagcctacaggagcagaccgaatgaacgaggatccaccttgggttcctcctgtcctctctctcgggcctgctagcctcctgcctcggtttcccctctttatcaaccgctctgtgtctgtctctctccttctgggggcccaggtttgcttcctcctcctcattccaggctctctctgagaatctgtgtctctgctcaggagggtgggggaagaagggaccctaaaagacaggccgtctctgtctccatctccgcctgggctatgtctgtctgtctgtcacctgggctgtgtctgtctgtctgtctcctggctttttttttttttcttgtatctctgtgtctctttgtctggatgtcttctctgcctcatctttcttatctctctttctctccatctttctcggtctctctctccaggggcctctgtctcttctccctccttcctctccctctctccgcctccctgtcccccccaccgtatcctccctgggcttctgtctccctggctctctcccctctcctccacccgggcccttcataaatacatcgcccccttcccgtcctcccgctgcctggcccagctccaggagaaggaaacatttatcttggtgggggcgcccacccctgcgcccgcccctccgcccgctggccacgccatccatcacccgagcccagactcctgtggctcattcgtcaccggccctgacaaatgcctgccgcccccttcccctcccgccccaccaagcaatcataccattagccacggctcagcggtggcgggaaggacccggcctgacccgggcggggggcggggcacaggctgcggctcccaccgagacccctctctccctcttttccttccctttctatctctcctcgccctctccgtcttttttgttggaatctgctttcctctgccagtttctcgctgtgcctctgggtcctgtctccggtccgtcctcctcctcatcctccttttcctcaccctctctccttctctccttctgtctctgtctctctcttactgagtctctttccagttctgactctgtctctgtgtctctctataactgtatctctctgtctctgcccgtctgtctctccctctctgtctctcatctctctctgtctctccctctctgcctctccatctctctctctgtctctccactctgtctctccctctgtctctccctctctgtgtctcttcatctctctgttgctccctctctctctgtctctccatctctgtctctccctctctctctgtctctccatctctctgtctctccatctctctctgtctctccatctctgtctctctatctctctctgtctctccttctctctctgtctcttcatctctgtctctccctctctgtctctccatttctttctctgtctctccatctctctgtctctacctctctctccatctgtctctccctcttgctctctgtctctccatttctctctgtgtctctccttctctgtctcttcatctctatctctccctctctgtctctccatttctctctgtctctctctttctgtctctccctctctctccctctctctctgtctctccctctctctccatctctctctgtctctccctcttggggtctgtctctccatttctgtctgtctcaccatctctctgtctctccatttctctctgtctctgtctctctctgtctctccatttctctctctgtccctccctctctctctgtctctccatctctctctgtctctccatctctctctgtctctccctctgtctctgtgtgtctctctccctgtctctccatgtccctctgtctgccatgggctctgtcggcccagccgtgccttttaaatctctggtctctgagagtaccctcggcgttggcctcactggctttgtgtgctgggaatggggtgagggtcttgccctggcgccctgggacgcccgccccgccccgctccccacctcgctctcctccctggtgctgtgttctgagtctctgggcttcctccgtctgcatcttctctgcatcctgtctgtatctctgtctctgctgcctctccggcccctgtgttttgttcttggctctctgctccctctccaacttcccctcctctttttgtgtcccttctccacctcctccaccgtctgtgttccccctctactgaccccacctacccctttcaatccaccacccatgacattcccttccccgcacttccccagggagagaattgcagggagcaggcagggaacgggaggcaaaggtggcgagaaggagagagtgaggaggtaccttgggaggcactgaagcctggagcctcatccctctctcctttggccatgtgtgcctggaagtcctccctagtgtctgatttcaatcctcagggggacggcagaacgtggaggagatgccaggtaccaacccttcccgattccctgggagaggccgaggagggagctgggggcatcagaccaggagagagggcaacctgggcacagtcagtgctgtgctggtggccacccattgccttactggaagagggaggtagtgagacccccgttctgggaagtaatcatagcagaggctgtctctgacccactcataccacctaggacccaacagcatctctcacgctggcacctgcgacccttccctgaatgctttccagaccagggtaggaggcgctagaagtcagcacccctaaagaggtcctgggccaccatcagacaggagttagtggatacataacccaaagtcttcaggtggggaactccagagttccctgagaggtccccagcaggatggagacctcattgtccacagggtgacctgctcattcaacactgcctttattatttatttatttatttatttgagatggagtctcggtctgtcacccaggctggagtgcagtggtgtgatctcggctcactgcagactctgcctcctgggttcaagtgatcctcctgcctcagcctcccgagtagctgggattatagccacctgccaccgtgcccggctaatttttgtatttttagtagagatggggtttcaccatgttggccaggctggtcttgaactcctgacctcaggtgatccgcccaccttggcctcccaaagtgctgggattacaggcgtgagccaccgcgcccagccttcaacaccacctttaatggttttctttcccatctccctccagtgcctcctgggatcacctcacaaataaactatttccctcccatccttgctgtgggctggcttctgttggtgctcagcctaagacggtggccagcgggggcatgatggatgggcagagaggaaacaaagggaaaagagggacctctcgtggtggtgaatcatatgtgtctacgtggctaggctgtgctgccctcatgttcaggcatcagcctagatgttgctgtgaaggggtgtgtgtgtgtttgagacagggtcttgctctgttgcccgggttggagtgcagtggtgcaatcttggctcactgcaacctctgcctcccgggttcaagcgattctcccacctcagcctcctgaatagctgggactacaggtgtgagctaccacgcccagccattgtaaaggtattttaaaaatgagattaatagccgggcgcggtggctcactttgggaggccgaggtgggtggatcacaaggtcaggagatcgagaccattctggctaatgcggtgaagccccgtctgtactaaaaatacaaaaaattagccgggcgtggtggccggcgcctgtagtcccagctactcatagtcccagccactcgggaggctgagccaggagaatggcgtgaacctgggaggcggagcttgcagtgagctgagatcgcaccactgcactgcagcctgggcgacagagccagactccatctcaaaaataaaaaaaatgagattaacatttaatatcgattgactttgagtgaagcagattgtatgggtgggccttatccaatcagttgaaggccttaagactgaggtccctccaggaagaaggagttctgcctccagatgacttttaggttttgcttgggttttgttcatttgtttgttttttgagacagggtctcactctgtcacctaggctgcagtgcagtggcatgatcatgactcactgcagcctcaaccttgtgggctcaagtgatcctcccaccccagcctctggagcagctaggactacaggtgtgcaccacgatgcctagataatttttatttttagtagagatggggtctcactgtgttgcccaggctggtgtcgaacttctgggctcaaacaatcctcccaccttggcctcccaaagtgctgggataacagacatgagccaccacacccggcctgggaggctaatatatattcatttaatccccacgacaaccctgtgacataggtactgttagcatcatcatcacgcattttccagatgagggaactgaggcacagagaaagtcagccgctacactatgctgcctcccaggacaatgttaatcactcccaagctgaccccatagagctctttgcatccaggtgagaatcatgaccttcggggtgaggtgacgggacaggtgtgaaagtcctcatgttttccaagcctcaagctctcaatgtgtctctctttgcagctgagaccttactcatcttcctgcaccaagactctacaccccctttgtttgcatttgttaagatgaaggtgtcccagacctggcacgatggttcacgcctgtaatcctttgggattacagtagttcactttgggaggctgaggtgggtggatgacctgaggtaaggagttcaaaggagtttgagaacagcctgggcaacatggtaaaacctgtctctactaaaaatacaacaattggccaggtgtggtggcgggcgcctgtaatcccagctacttgggaggctgaggcaggaaaatcgtttgaacccgggaggtggaggttgcagtgagccgagatcgcgccattgcactccagcctaggcaaaaggagtgaaactccatctaaaaaaaaaaaaatttgaaggtgtcccttgtcccattctacatcgtggaactcatcctgtcccatctttgcccttctacctgtgaaactttgggcacattgcttcacctctctgagccttagtttcctcttccgtggaatggggtgatgtatagaactggcaataggtttaagcagatcatgcttgggggggtccccatcactgccagctgctgttagcacaggcctcccttgctttcctgtgcccctgtagtcaatgccctctactgctcctccagcaacctcccctcctcacatcaggactctccagagagtgatctacatgccctgactcaatttccccacctcccactgcagatcagtgcaccgtctgcccctacaccttccacaaacctgttctcatcaaggcctaaagccaaaggtcgatttttttttttttttggtagtggggagacagggtttttctctgtcactcaggctggagtgcagtggtgcagtcctagctcacggcagcctcgacctcctgggctcaagcaatcctcctgcttcagcctcctgagtatctgggactacaggcacatgccaccacgcttggctaacttttaaagtttgtggagacacgaggactcgctatgttgtccaggctggtcttgaattcctaggctcaagcgacccttctgctttggcttcccaaagtgctgggattacaggcgtgagccaccatgccgtgggcctattgtcttaccttggacttcaggttgggtgcggccggtgggaggaagtggcaggagactagcaggtgggagcagaatgaggtcgaggtgcttactctcccggcgccccgctatccccagtgcaggttggtgatgcctgtactcttctactctacagactcaggtccccaggtctctgcagcctcgggtgcctctgctcaccccttctagcccaggtatggcaactgctccctctgctgctagccctggggtactacaccttccctcgttttccccaaccctgcccactcctcagtagccctttcacccaactctccctggctactccgtttgaatgaacacaccacctctctcctgccaagatgcactccctgaactccctcacgcagccccatccattctctctctcaaccactcccttctcaccatcgccctcccaccctcctactcccctctcccctcgtctgctgcctctgtccctgctccagccttgtccctggtctcccagcccccagtagccaggaggaacgtctcataaaataaatcaggtgatatcaaccgcctgcctccttcccccacttaaatcccttgcaaagctcccctttactcttaggatatattccaagctccctagagtggctgataaagtctcttatgatttgtcctcaagttcactccccacgcaccccatacctcgttcatgataaccatttccagggctctgaaaaagccattatctcccaactctgcacacctttacacaggctgtgtcctttggcacaacacacacacacacacccctcctcctgtaggatctgagaaaattacttgctttatttaggaaaccccatcaaccccagctctttggctcaggcaaatgaacgtctctcttttgtgttcccaggatgcccataaagagaaacagtttgtggctcatgcatgggggcgtggctagtggaagcccctgactgaagcaggaaggcgtggctgaagcacgactgataagtgggggtgtgattagtggaagagctaggctgatgaatgggggcgtggttagtggaaacccgtaattgacggatgcgggcgtagcaagtggaggagcttggctgatgaatgggggcgtggttagtggaaacccacgactgacgaatgggggcatggagagtggaggtgcgtggcttgtggaagcccatgactgatggatgggggtgtggctagtggaagagctaggctgacggatgggggcgtggctagtggaagctcattactgatgggggcgtggcgagtggaagagcttggcggctggaccccggcgctgctgctatatgtgggtgtgtcccgcagacgaccgcgggccgcaaaaacccagattacttggtttaacagttgcccaaatctcagtcagagaccttattagccccctcctcctgaatcccagcttcccacgggactgtttttcaggcagaatttcaaagttttatggcaacttttacagaaatcacagaaaagagacagcgactgatgatgagctgggggagagaagggtagtgggtaacgggtctgggatgttggggctgagcacaacaggacgatagaatgctgaaaacctgtgggaagcagaaagttatgggggtagttgggtcatcctaggggcccaaggagtgggtggcactgcccaaatgtgtcctttgggcaggaaacatcaacagtaagaaaatgcagatggcctaccgacagatggaaggcctccaaagttaaaaatgcccacccagatcccttggcccagtcccatccccccacccatccccaccccccatcaggcagagatgtggcagcatttgctggcttgtagcattggtcctctgggaccctcggtctcctcttcgagggtcctgcccggattggctggcactgagggcaaaaggaaccttccagattgtcaggggagatcaactggactcgctttgattcccggcctcctccccaaagctggttctcatggctgagggagtctgctgccctctcaaaagttgtctgtcacccccttttcccaagacatgcaccctcccgcgtcccccctcccccaaacacactatatacacacacaagcccctccctccaaggcgtggctgggctctcagaggtagtggagggcgagtgggggagctggaatgtctgaagttgcaggttcaaaatgtgcttcctccggctaagccctgggactgaaaccccaaacttctcccctcgtctccgagcctggagaatgagtgtcctcccaagaacccgagtggagggattggaaggaacggtgtgcggcctccttgcgcgcacacccacccgctcctccccgccggggctgagcggagctccctgagggctggggggaagggctgggagctgagacggcctctgacagcctccttcgagggtcccccagggagggtgggttctgaggctctgggacatggggtgaagtggggggggggtcactaggggaagggagactttgggggcaaagccaggctgggtgaccaaggagagagaccttaaactccccaggatggttactgggggtggttccctggggaggggactggggtggaaatttccccagggatatagacggtcaccaacaggatgggctggagttggggtcaccgcaggggaggaaccggggaggctcccgagaggaagagggaaggctgagctactggggacacagaacagggcaatcaaagccaggggagggggcggagaagggaggccgagtcccaggagaggaggccgagtctggggggaaaaggagaccagggtccaagagcaggtgcagccgagtccctagccccgggcgggcggtggggacgagtctctgcgcgaggccctagaagccccggatgtggcagtacgcctccaggctggcgaagaggatgtacaggagccagaggcccaggaagagcgcggtggtggcgagcttgggtccgcgcgggccgcccagctcgccgccgatgtgcggccggcgccggtacagcagcacggcaatgcccacgaaggcgaagacggtgaagagcgtgacggagaaggccagcgtgccagtgcgcacctcgaaggggcggccctgcaccgcccagtacacggcggccacagaccaggcgacgcccaggccaaggaacacgttcaccgcgttggagccggtcacgttgccgatggacgcgtcggcgcactggtcctgcagcgccgccaccttgctggcgaacgtgtctgcgaggcagagacatacaggtcggaggggctttgcgccgccacccacaggggcgggcatccgcctgccccctcccagcctttcccggtcgcctgctttctgcgggcagtgtgggctcaagacccctgacccccacccaagaggcaaagtccatcaccacctttaggcctgctcgccactggaaccgctgccggctttctatgggacctgccgcctgctttctgtgggattcattctcttctatgggactcactgcgtgatttctttttttttcctccgagacggagttttgctctgtcacccaggctggagtgcagtggcgtgatctcagctcactgcaacttccgcctcccaggttcaagcgattctcttgccggagcctctgagtagctgggattacaggcgcccaccacgccctgctaagattttgtgtttttagtagagacggggtttcaccatgttggccaggctggtctcgaactcctgatctgaggtgatccactcgcctcggtctcccaaagtgctgggattacaggtatgagccaccgcgcctagctgtattttttgtttgttttgttttgagacagggtcttgctctgttgcccaggctggagtacagtggtgcgatcatggctcactgcagcctcattttccccagctcaggtgatcctcccacctcagcctcccgagcagctgggatcacaggcatgcgccaccacgtccagctaatttttgtatattttgtagatacggggtttcaccatgttgcccaggctggtctcaaactcctgggcccaagcaatcctacccctgccttggccccccgcctttgcctcccaaagtgctggcgtgagccaccacaccccacctgccccctcatcttagttaaaactctgaggtttggccaggcgtggtggctcacgcctgtaatcccagcactttgggaggcagaggtgggcggatcacgaggtcaggagttcgagaccagcctggccaatatggtgaaaccccgtctctactaaaaacgtaaaaattagctggatgtggtggcgcacgcctgtagtctcagctgctcaggaggctgagacagaagaatcgcttgaacctgggaggcagaggttgcagtgagccgagatcacaagatcactgcactccagcctgggtgacagagcgagactctgtccccacaccaaaaaaaaaaaaaaaaaaaaaaacaaaacccaaaaaaaccaactttgaggttcactggcctggtttctgtcatgtcccccaacatagttccatggactcttctgtctggtttcttgcgggatgggacatcaacagcttgtttctatggaacccactgattggcttctctgacaatccccaccgtcttcctaggaacccctctccccacagctgtctcttccccaccctgccaccttctctctatgaaatccattgtctggtttctagcatttcctgctaccttagttttatgggaccttctacctgggtgcttttggggaggattcaattcacatcttgcacctaggggacccgctgcctggcttctattatgccccacctccgtatttctctgagacccaccacatgggcgctgtgtgactccacccacctcattttggcaggatcctgtgttgcccctgcctggctcatctgagatcctaccccaccaaagtctcccagggtgttaccagggatggaggtgcccagggcaacgaagacaacagcattgacagagtccttgaggccaacggtgcagccgaagtgggaggcgaggtccccaatgagggcggtgagcaggccgatgaccaggatggagacaccaaagcaggcccagccgtggcagtactcggtggggggcacacaggcgaagagcaccttccagaacaccgtcaggaagtgcatcacgtagtcaaagcacgacggcagccgctcctcccgggacccgtcctcctcctcctcctcgtcccctgtgggcacacgacccagctggggcatacactcagacttccttccttgcctacagaggccccattttgtctaacttcctgacagcaagtcccattgaatgaacttctttcccagaatcccttgcacctacctgtggccaagtcaactgctaaaaacagttactttcccagaatcccttgaagctaggagcttgattgggcccaggtgaaaaatatttactttcccagaatcctttggatctaaatatggctaagtcagcagtaaaaacagttacttccatagaatcccttggagctaggggcatgactgagtccaggtaaaaaaattttactttcccagaatcccttgcacctaagtgtggccatgtcagcagctaaaaacagttactttccctgcatcctttgaagctaggagtgtgaatgggcccaggtgacaaatatttattttcccagaatcccttgcacctaaatgtggccaagtcagcagctaaaacccattactttcccagaatcccttgaagctaggagcatgaatggacccaggtgaaaaatatttagtttcccggaactgcttgcacctaaatgtggccaagtcaatgctaaaaacagttactttcccagaatcccttgaagctagaggaagccacatctgcccagctaaaaacatccagttccccaagaccgtttgctgccagggacagccatacccctagctaaaattattcattttcccagaagccttcacagctgctgaaagccagtccacagctagaagtattcacttcctcagattcactgcagctaaccagagccacagtctccactaaatgtactcactttcccagaatcccttgcagctagagggctatatacccagccaaaattaatcactttcctagaatcccttgagactagcaacagctatggcctcagataaaaatatggtattcactttcccagaatcccttgcagttggcagttgccatgtccctggctaaatacttgttttgccagaattcctcctgtgagtgactatctgacccagtctgccaatgagatataaacagagggtttctggaaagccctggctttcctgatgtgggcattgggttacagatgtgttttctgagctttgtaaatgatgcctcatgcttagagctgtatcacctattgtgacctaatttgaccagcttttgacctgcagtgacttttttttttttttgagacagagcctccctccgttaccaaggcagtagtgtgatctcagcttactgtaacctccgcctcctgagttcgagtgattctcatgcctcagtctactgagtagctggaatcacaggtgtgcaccaccccacctggctgatttttttgtatttttactagagatgggatttcgccatgttggccaggctggtcttaaactcctggcctcaactgatctgccctcctaggcctcccaaagttttgggattacaggtgtcggccaccgtgcccagccgacctgcagtggcttttataacctgaaagccctaaggcagtgttttgtttacctcaccctaagctgattagtataaagcaatgaatgagaatcaatgagcacacttgtgtgtggcacgcattacatctggaaggatgctcatgagaacgaacgtagctcctgaccagtcactgctgaacgcatccctaactgatgtaagacatggctgaggtcagagcagggaggccacgctctttgggagagaggtggctgctattaccgcatcactatgtcagttgaggcttctgcctgccctgcttcaaatccttccttggttcttgtactaccttcaaacccaggcccacatgcctaggcttggcattctgcggactctggcctcagctgacttccccagctgctcccctctacagggaggctcgtggttatgcctgtcactctgaagtcacctctctggtgtccaaccctggatccactgtgtgatcctgaatcagtgtcctcacctctctgggcttctgggtgcctatctgtgataaataattggacctgcttcatgggaaacttgtgatgacagaatgagttggttcatgtaaagtgctgtcaacggtctcggacacctccagcgttattactgttgtttcgattgttatgattgaaggccttttttggtgcctgggggaaattcaaagatgctccatgccaagtccagcccacaaggagcttacagtaggaagggaggtaaaggaagtacaaaagctctgcgacaagatgggacccgactcatctcctaagggagtgaggactacccttctccctcacccctccagcagctctgtgctcgcacagcaaagaaccaaaaggcacgtgctgaacaaagtgcaaagtgaccaagctctgatccagacactgaggatacattaattaaaatgagttcacacaggaaataaatttccaaccatgcctggcactcaagacacgatagggtcagctgggcacagtagcttacacctgtaatcccagcactttgggaggcggatgtgggcagatcacttgaggtcaggagttcaagaccagtccggccaacatggtgaaatcccatctctactaaaaatacaaaacttagccagacatggtggtgggtgcctgtaatcccagctactcaggaggctgagtcaggaggatcgcttgaacccaggaggaggaggctgaggaggctgcagtgagccgagatcacaccactacactccagcctggatgacagagactacatatctcaaaaaaaaaagacatgatagggtcaccgttgtcataatcaggattattattacagttattattattgttatgttgttattcttcctccaccccgatctaatcacctgatctaaccacctggtttctataaacccacagcacgatgtacgctgggtctctacgaccgccacctcccacctcgtttcagttccgcctcatcctccgtctccactaagtccccagaggaaggaaatgctccgaagctcaaagagccccttgccatctccccgttgttcgtggaatgaacctcaaaggagcctctgcagggcccgtctcctgctagtttcttttcttcgtttttttttttttttttagacggagtttcgctttgttgcccaggctggagtgcaatggtgctatctcggctcaccgcaacctctgcctcccaggttcaagcgattctcctgcctcagcctcctgagtacctaggattacaggcgcaggccaccatgcccggctaattttgtatttttagtagagacggggtttctccatgttggtcaggctggtctcgaactcctgacctcaggtgatccacctgcctcggcctcccaaagtgctaggattacaggcgtgagccaccgcacccagcctctactgctagtttctacagcctctacccacaccctctccactttcctcccacaagctctctctagccccaggggcttcccccattcaaaaccctccatggctccccagtgtgttcaaatgccacccaagctccctactgtggtccacaaggagcagtgtagaaatgtgccgatttccagcctcatcctggtacctcttcctcccgcccaacaccaggcacccacccaaaaaatgtgccataatctcgcacactccagggcttctgtgcttggctctccctctgcctgaaacactctccctgtcttctccctcctcctggctgacatctttacccatttgaagactcagctgggaagccaccccctccaggaagccctccctgactttcaggctgggttaggaaccgcatcagggctttcctccgggtctcccatcccagccctgcctactctgggttgtctgtgtcttgtgacatgtctgtctcctgcactgggctgtaagctccatgacagggccagaaatcacttctgtgtccctggcaatgtctcacatagggtcgggcccagaagatccctcagaagtatgtcagaagaatgtggcttcagagggagatgccactttgtttctactgggcaaacagtctggtgtttctaggactgctgccttgtattttcccatccccttaagcctggtttctttggatcctgctcgcccagtttctttgcaaccacaattccatgtacgccttcagtccccaagagctggggccttaaccctgatgttatgtaagagattgaagccctgagctccgacctcgggccttttctggactccctgtgggacttcaggccactccctcctctgtctctgagcctcagtctccccagtccatatcacaaagggccagtgttggcttccaagaccgtcagtgggtacaagtgtcgtagtgtctctagccacaagggggcagtgtgggcctgtctgaggccaaggagggtggtgacccgcgcaggtaggaaagagctcggtgccctggtgactgtctccagggcaacggaggaacccaggctctctctggggtggccacaccatttaatctgttcccaccctcctgatgcctgatgctgggagaaagcccaggctgggaaccctcccggttcagcccagagccaaacacaaaccctcccagccgctccagccaccacctctcccttctctgccctttctgtatcctcatctacctgcctctccctctccccggcccatttcagtttgcaccgttcattctgtctcatgtcttctccatgtctctctgattctccctgtgtatttctgtgtgtctctctctcctgcttgtattttttttagagacagcgtcttgctctgttgcccaggctggagtgcagaggcacgatcatggctcattgcagcctcaaactcctggcctcaagcaatcctcccgcctcaccctcccaaagcgccaggattccaggcatgagccaccgcgcccggcctgtttatctttgtgcctgtctctccattcatttctccccctttccctgtgtctctgtctctccatctttctctcttctctctcctccctccccacttacctgcgctcaccgtaattgcctctaaaaactgctccctccatgaatgggtcccaattaccaaggccaagttcgttttcttgatgagtttatccaccgtgttctggggatgagagggtgggggagaggtcactgcccctgagcgaaccagggaagctccatgttgggtcctgggtcgggggctcacagcctgtgcccaggggtcctcaactttccacacccccgttctgaaggcaagcaaggaaaagggaggcatgtgctgtccgtggtcctgacgtgggacccttctttggcttgatcttaggaaccttgtggctccccgctttccggaccctccccaaggaaatgaaccaggctggactccaggaaggtgaggccccggaaaatcaccttaaaatcatatgactcctcgatgatgacctccagccggcagttctccccaagaactggcttgcccatctctgctatcctccgagcctcctcctcctcggctgttagcttcctgtccccatcccctgcagcatgaggggtgggggttagactcctgggagacctacctaattgggcctgtgacgcctttactacctgtccccatagttagagaaagcctatctgttctcctctgggaagctccttggtgactcctcccagcctcccacctgaccaccgtctccttcaaccctgaggtccagctcccaagggttggttcatgatctttagttggtgggctctggggttcgtatggtggaggctgtgagactttaggcaatacctgagcctctctgtgccttagttttcataactgttaaacgggcacaataattagtacctacctcatggggtggttgtgagacttaaatgagttaattcgtgtgaagtgcttagaacagtgcctggcacacaataaatattcaatacatgttactatctttattattatcaccaacattatcatcatcgttgccaccctgataggggaggcctggtctctacatccagtttctggaaacatcctagagtgtggctgacatggtaaggaaaggggaggacatccgattttggcacaaatcttggaaccagacccacctacatcctggtcctgagctcgcttctctccccaaagtatgctgacccctgactccaagcccagcagcagcccaaccctaattctggtccctaactctgagctggactctcactgtggccccaaatggaagcctgtcatcaacactgactccaaaccccaaccctcagccctggatctgacctcagcacaaccctagccctaaaccctaatcccgactctaacattcaccataacctggagcatcaataaccccaagccaaatcccacactctatctccagatctaactccagtcctacacctgacctcaaacctcagtcccaactcccaactctgacaccatcactcatgaggagcttgaccacacggcagaagctgaagtgtgttcacctgaacctgtttcctctccttcctgggcaaagagctgaactacatttcccagcctcccttgcagctgggcgtggccacggcctgagttatggacactagaatgtgggcagaagtgatggtcagtccctccaggcttagcccccgaaaacctcccatgtgagcctcgaaactctcttgccctgttcaccagcagcaaacccagccacaatgccaaagctccctggcacagtggagtcacaagatggaatggccacatggcagaagaaagccacccaccaactaggaacactctcgtaaaactttgcctgagaggccaggtacagtggctcatgtctgtaatcccagcactttaggaggccaaggcaggtggatcacctgaggtcaggagttcgagaccagcctggccaacatggtgaaaccccatctctactaaaaaatacaaaaaaaattagctaggtgtggtggcaggtgcctgtaatcccagctactcgggaggctgaggcaggagaatctcttgaaccccggggggtggaggttgccatgagccgagatcgcaccattgcactctagcttgggcaacgagagcaaaactccgtctcacaaagacaaacaaagaaacaaaaaacaactttgcctgagcaagaaataactttttttctctcttctccctccttccttcctttcttccttccttccttccttccttcctcccctccctccctctctctctctctttcttacttttctgagatggagtctcgctctgtcacccaggctggagtgcagtggcacgatctcggctcactgcaacctccactttccaggatcaagtgattctcctgccttaggctcctgagtaggtgggatcacaggtgcccaccaccatgcccggctaatttttgtatttttagtagagacagggtttcaccatgttggttaggctggtcttgaactcctgaccttaagtgatccgcccgcctgggcctctcaaagtgctgggattacagacatgaggcattgtgcccagtaaagaaataacttttattgtgttaagcccctgtgacttgtcggtcagtttgttatagcagcttgtattgcttcctccaacgaatacaatctttaatctaactctaatcctaaccacggatcccaattctgatcttgactccaaaatgactttgtccatctccaagccactgaccttagccctaactcttactccaatctctgaccttggccccaattctaacctaaattcctcaaactctattactcacctcaaagtccaactttagctttgacctaaatctgactctaattctaatctgatcccaccagcaggaaagcacctccactgtgactctcaccttaacatggtcctaaccccgatctccaatccaaaccccacctcactcctaatcaaccccaaactggattctctctgacctcactctcacaaacccagatctgattgtatgacttacaaccctgattacagacataatcttttgagatggagtcttgctctgttgcccaggctggagtgcagtggcaccatcttggctcattgcaacctctgcctcccgggttcaagcgattctcctgcctcagcctcccaagcagctgggattccagatgcctgtcatcacactcagctaatttttttttttatttgaggcagagtttcgttcttgttccccagcgtggagtgcaatggcgcgatctcggctcaccgcaacctccacctcccgggttcgagcgattctcctgcctcagcctcctgagtagctggaattacagttgtgtgccatcaggcccggctaattttgtatttttaatagagacggagtttcaccatgttggtcaggctgctctctaactcctgacctccggtgatccactctcctcggcctcccaaagtgctgggattataggtgtgagccaccgcacctggcctcacccaggtaatttttgtatctttacaagagatggggtttcaccatgttacagacataatcttgacctccaaaatgctaactgtaatcccaaactcatacaggcaccaccaactctcaggccagaccccactgtcccccagccctgaatctgcctttatctcacctccaatctgcctcaaacccaacctggaagagtagctttggggctgggaccctcccccaggccctcttccagtggctcctccccactcagagcccagaggtgacttcactcaccttgattgagtagcagagctggggagagacagagacaggcagacagtgagatcagttccccacgaagctcaggtccacgagctttaaggagtgcctgcaattgagcccctgaaagtcccccgaccctggaccccttacttctcccacagcccactggtcacccctcacctgaaatccctcgcttaagccactggggctggcccagctcaatgaagaaattatcctttttctcatattcctcgtcatcaactatcttcacctgaagagttttcctgtgcagggggtaagggggaggcagaacactcagtgtaaggccccctccccagactcaccaggcaaccctcctggcagccacccagttttccaagcacctcctctgtcccagactccacaatctcatttacttctcaccaccacgcagggaggaaggctctattatcatccccatttgacagaaacaaaaccaggcactggtgaggaagctgagtctgattaaagtaaagcattctgggtgcggtggctcatgcctcttatcccagaactttaggaggctgaggagggagggttgcttgaggccaggagttcaagaccagcctgggcaatatattgagagcccatctctatttatattaaataatttattttaaaaaataggccgggcacggtggctcacgcctgtaatcccagcactttgggaggccgaggcgggcggatcacgaggtcaagagattgagaccatcctgtccaacatggtgaaactctgtctctactaaaaatacaaaaattagctgggtgtggtggcacatgcctgtagtcccagctacctgggaggctgaggcaggagaattgcttgaacctgggaggtggaggttgcagtgagctgagatcatgccactgcactccagcctggcaacagagcgagacaccatctcaaaaaataataataataaaaaaataaagcaaagcggtatgagctcatggttgagacaggatttgaacttacaactgtcagaatccagactgttaacccctgcactccagcccagccactatggtctcctacctagattactagttgcctgctaaacaatcccatgcttcagcctcaccgcccacagtctgttccttcaagagcagccagagtgatcctgatagaaccaaagtcagaccgcattcctcccctgtgcaaaacatttgcaaggctcctatctctcacagaatgaaagtcaaagtccttaggatggcccacaagaccccctgcaatctagcactcattccctttctggcctccttgctattccttgaacaagccaggcctgctcatgcctcagggcttttgcactggctgttccctctgcctagaacactcttcccccaggctcccttcctcagttcttcattcaaacttcaccttctcaatggggcccacttcttccatcttatttaatagtgaaatccctcactgctccccctccagcactcccttatactgctctgttgtctttctttttaatgtatttattattatttttggagacaagatcttgctgtgtcacccaggttggagtgcagtggtgcaatcatagctcaatgcagcctcaaagtcctgggatcaagcgatcctcctgcctcagcctctcatgtagctgggactacaggtatacactaccatgctcagttaattttttattttttgtagagatggggtctcaccacattgcccaggctggtcttgaactcctgccctcaagtgatcctcccatcttggcctcccaaagtgctgggattacagatgtgagccatggcacctggcctgtcttctttaaatatcaccttctaacaccctctaacatttatttagtttattgttcgtcatttaccatttgcttccccatctttaaatttaagttcccccaggtaagttcatttatgttttttgttttatctccaacacccagaacagtccctggcatagagcacaccctccatgcatattttgctaactccaatccttcagcacagaaaaccctcagcttcctgctctctgtcccaaccagatctggagagttaaccaagtgctgatgctaactgattttctcagcatctctgctcctatggtaaccagggggtggcaggaaacagccagaagttacctgtcaccttcaggcacataatccacacccctcgaccccaaagacccacaaacccagaatgcccacagctttgccactggcaactctttaggctgtaggaaccatgtagtcccacaaggcctggccccagaacccaaaaacacaaacacccagcccacacagtcacccaatcgaggaagcacagccgatcacaccgcccacacccacacgccatcacaccctacagccattcccactgcagtggcaagactgcatggaccagatgcccgtcagttagcacgactcccccaccacagccttggcgacatcgccaccctgcagcccctcactgtggtaccacgtagacgctcctaccttatatctaactcctgacgcctcttggtgtctctgtttacttccttcagtgcctctctgcatctctgtccctacattttccatcttcttttctctctctgcctctctcagcttctctgggtctatctctccatctctgactctgtctctctgactctccagcagtctctctctctgactctgactctctccgttctctgtctcagtctcttctcatctctctgctctccctttttttgaaacaaagtctcgctctgttgcccaggctggagtgcagtggcataatcatggctcactgcagccttgatctccagggctcaagcaatcctcccacctcagcctcctaagtagctggaaatataagcgtgtgccaccacacctggctacttttaaattttttatagagacaggatctcactatgttgcccaggctggtcttgaattcctggcctcaagtgatcctcccaccttggcctccccagtgctggggttacaggtgtgagccacagcacctggcccgcccttctttatctggattcttctctccctgtctctgtctttcagagtctaaagaatggagtaacaaaagtcaacacacttcaagcagaagagtttcaatcaggcagtcattcaaaagacgcatctcaacacacaaacacgcacaagacacagcgacacccgcgcaaggacaggcgcacacaagacggccatgtggggacatccgcccacctccaccctcctggtttcaggatattttcaattttctgtgggtggaaagaaagggccgcccccgacctcggcgtgggctgtgagctgtccgcggtgctgaaatgctggggccggcgaggagggagggtctcccgagacatgctcctcacacaccctgacacacacagacagctgccgacacagtgacatgctgacagggtgacacacacacctctgtcgctcactctcgcagacatgctgcgatccgctgacacacagtgactgacgtgcagtgacaggcacgtcaactgcgcctggcaggcgcaccctcaggggacccaaatgcaggagaaacccaacgcgcaggaaacagcaagagggactcgagctagaccaagacaggacttcctgagatcaaaggaagcagatttcctccccagcctgcccccttgtttcctgaaaactccactctcctgcccttctcccctgccagtctctgatctcagacccagtctcctcatcctgtctctcactgacccaaactcccttttctctctgcagcatcgtgagaacctctccttccctgggtcagtctctctcctccatgaatgtctttatcgcgtctccatctctctgcctttcagtctccctccatctcagctttcaatatccacctctctccctccctcaaagcatctctgtctctgtgtctcttcctttttttcgggggtggggtgggtgggagatggagtttcgctcttgttgcccaggccagagtgcaatggcgtgacctcggctcacagcaaccttcgcctgctgggttcaagcgattctcctgtctcagcctcccgagtagctgggattacaggtgcatgccaccaggcctggctaatttttgtatttttagtagagacggggtttcatcatattggtcaggctggtctcgaactcctgacctcagatgatccacccgtgttggcctcccaaagtgctgagattacaggcatgagccaccgtgcccgacctctaagttcctgtctttctgtgtctctgtctctctgttctgtctctgtttctctctccagttctgttattctgtcttcagctctccctgtgtctatctctgtgtctctgtctctgtctctcatgctctccctgccaccccatctctgggtgtctctcctccatctccagcccagctgcttcaaagcgcctctaattagtgcctgcccatcagaggaaggaagagtttccctaaacactaattagcctcctgttctctgtcttctgaagccacagctgggagcttgtgggggtgggggacagagggtgtcccagcctggggaagccatgtgggggaggacagggccgtaaggttgcagcagcaggagggaagcaggttggactataagaaggaccggaaaaagcagaaagaaaactctccattcccccatctcttggtgtgagagaggggtctgggatggtgcctctcgcagcccccaacccaagttctcaacaaccctcagacagagaccaagccagacagagagagagaaggaaaggtgtggagtgtgcctgaaatataagctgagtcagagagcgaggtgctggggacagacagctgcagatgaacagagacgcagagacccagagagagacagcccagggagtgagagatgcagagatgcagagggagagacggagagacagcgagagcagtgagaagctgagtgctgcccgaggcggaagcgcagaggctgggaggaggagggagggggagcgcggtggggactccgcttgagtaggaggcgcgtgggcggcacggaggagggagacagacgggcatgcgggggcggaagagagcgggcagaggaggggcaggcgctgcctgcatcctgggcaggggggtgggggaatgtgaggcttcaggcacacattgggggacactcggtcacctgtgtaaggggtggccagggatctgggcgtgagaacagccctgacttaataatttagtgtacgtgtccgtgattttatgtgtgtctgcgtgttttttttctttttttgagacagggtctcactgtgtcgcccaggctggagtgcagtgggtgatcacagctcactacagcacctaactcgtgggctcaagccatcttcctgctttggcttcccaagtagctgggactacaagtgcacaccaccatgcccagctaattttaaacaatttttagcagagtagaggctgatctccaactccaaggctcatgccatcctcccgcctcagtttcctaaagtgctggcactacagacatgcgccaccactaattagaaaaattatttttagagtaggagtcttgctatgttgcccaggttgctctcaaactcctggcctcaaatgatcctcctgcttcgtcctcccaaagcgctgggattacaggtgttgaccaccacgcctggccctgccgtgtgtgtctatgtgtgtgtggtgcgtataaatggctttgtgtccaatctgtaaacgtctgtctacatgtgtgtgtctgagtgtatccagccagcccacctccccagaccccattttcctaaatcccagccctcaggctccccagtgtctccccaggccctgccctgccttcccaggcccccagattccagcaccatcttttcccaaatcctcgcccagattcgcgttaggtgccccgctatttccccaggttcttcctcatacccagaagccccaccccttccctagctccgcgcgcccaggccccacccatcttgttaggccccgccttcttccgcagcccacatccattttcccatttcctgatgtcgtatgtccaaacccagaccccacctatcgccctggacccgccccctctccacagccaccgacagcgtctcatctccacaagcctctccccacatctccctgggtactcttcagcacacactccacgagctaccaattaaggccccacaccgctctccccaggccccgtcccatctctcctcacctcgtccccccttcctccttggggccctcttctcacctgtccggccacccttctaggcctcgcctcttcatttcacagtcacaaccccaccaggccccgcccacgtggtagacacagcacacctaggccccgcccctcccgaggccaagcccactttggagaacgattcactcaggcccctctcctcctgagggcccagctgttcagtgaagccccgcccacgtcgtgggcatgggtcacaggccccgcccacgttgcgggcacggccacgcaggcccctcccctcccgaggcccaaccaagacccgcccactatgtgggcatggctcacccaggccccgcccctgagccacatcaggcctcgcccattccgaagccccgcccctctccgggccgcctcgggcgtgctcacatggtctcgtcgtcgccaaactccagctctccgcacgcgtcctcgtagtgcacgccgccgccgcgcgccgtgccgtccaccgtgcggtagggaaggcgcacggtgccgcgcgcgcccgagctgcgcacgacgcgcacgtccacggtgcccatgcactcgctcacgtgcagcaggcggtcctggaaggagaagatgcctgcgtggtcgtcgtccaggatggtgacggtggccagcagcggcgccaccagccgccccttgggccgcccgccgccgtccggctcgaacatgccctgcgcgtcgcccacgcgcaggttcagcagccgcacgaagaaatgctcgtcctcctcgaagatgtcgtcgtcgatgatgccgatgcgcagctccttctgcgtctcgcctggtttgaacaccagcgtgccctcgctgcggcggggtggggagggggaagagcggggtgagggtcggtcatcggctgtgtgttgtacggggggagtctggacgtgcttcccagaggagacgtaggtgccatagaagaactcccaagtatgagggtcgacaggcattaaacaagtaatactgagggtgaatcggggtgggcgtcctggaggaagggctgcagagcgggaacaagacagagtgggcccctccccgcgtggaactcgtgaagagcagaaggtgggaattaaacaggtaatgataaggttgagatcagggcaggcttcctggaggaggcattagcaggtgggcatactccaggcagaaggaacagcacatgcaaagtccaagagttgagagggagcctggggtgttctacatccctgcttctcaaaccttaatatgcatatgaatcccctggtggagcttgtgaaaatgcagattctggtttagaagctcccgggtttctagaatcgcatttctaacgagctccaggggatgtcctggtcacattttaagtggcagggatataggacccagaaaggactctgtcattcctctgataaaaacccttcccagatgcccccaagaggaagtccatacaccttaacttggcatcactcattcattcaacaaacactcctaagggcacccgttgtgtgccttgtgccgagtggtgctggggacacagcagtaaccaggccctgtcctcacagggttcacagccccatgggagagccatatcaccatgacaattgcacatttaatgatttaattacggttcattcattcaacagataactgaccgttgtgtgccaggcattgttttaagtgttgggggaacggcaccaataagaagctttgagattctgttttagtgcagaagaatgaacaataaacaaacacaggatgtcaggtggtgatggtgctatggagagaaacaggagggtagggagtgaggagagggagctgttggcatggtcaagaaagccttttggaggaggtaacatttgagcagagacctgaaggaggggagggagtgagccatagggaggatgcctggaaaagagttttttgttgtgttttgttttgtttttttgagacagagtctcgctgtcatccagactggagtgcagtgtctccatcttggctcactgcaacctcccctcccgggttcaagggattctcccacctcagcctcccgagcagctgggactacaggcgcctgccaccatgcctggctaattttgtgtacttttttgtagagacagggtttcatcatgttggccaggccggtctcgaactcctgacctcaaaagatccgcctgtcttggcttcccaaagtgctgggattacaggcgtgagcaaccgtgcctggccaaaaagagtatttttggtaaagggaacaggcaatgtgaatgctctgacctgggactggacagccggacaggggacaggatctgacttagggacgggtcacctcttcgaggaactgcagggagaccagcatgatgacagcagagggagccaggacgagagggtggaagatgacatcacagtgggaacgggggcagatcacctagggcctgggtgggccacggtgaagacttctgcgtttaccctgagtgaggaaggagccctgtgaagcttcgttccgagcagaggagggacacgagctggcttggtgttaaaagagtaacagttgtggaaatctctgaaacacccataagatactctgtaatggggggagccggggagggaacaaggcagtgacattagattactcagagtgaaattctgaggggtcatggagtaagtggactcttcctggcagggctgcagacatcagcgtgactctgggatattaagaaatcttgaaaatctatcatttcccccaatccctcctactgtgcatgtaaggggctcagcaccatctctgaaccctgctatgtgatccatatgcattcactatcactttcatattaaaggggttctggggccgggcgcggtggctcacgcctgtaataccaacactttgggaggctgaagtgaatggatgacttgaggtcaggagttcaagaccagcctggccaacacagtgaaaacccgtttctactaaaaatacaaaaattagtggggtgtagcagcgcatgcctgtagtcccagctactctggaggctgaggcatgagaattgtttgaactggggaggtggaggttgcagtgagccaagatcacgtcactgcactccagtctgggtgacagagcaagactccgtctcaaaaaggtgggggcggggagtcaggctccagttttccagctctgtgggaggaagagagggaccgcaaggttctggcaagaggtagggggcatagaacctggtgaaaagacctgcagtggagggatgagggagtccctcagctcaggattcactgtccgtggtgatggagcacccaggagggtgggctgacctgcttcaagcccagtttggccaccatgccagctgtgtgatcttgggcggtcaggattctgcagtcctctgagccttggtttccttatctgtggaatgggctaataatagtgtttacctcctggcgctgtggtgaggactgaattgatacaggggaagcacccagaggcacagttagctagtgatatccacatattaatatcataatcttagagtcctaaaagtcatgggatatgagacatttacatgtaagggataaagggatcagtaaaatatggagattgtagcactatctttttttttttttttttttttttgagacggagtcaccctgtcgcccaggctggagtgcagtggcacgatctcagctcactgcaacctccgcctcttgggttcaggcgattcttctgcctcagccttccaagtagctgggattacagatgtgtgccaccatgcctggctaattttttgtatctttagtagagatggggtttcaccatgttggccaggctggtctcaaactcctgacctcgtgatctgccagcctcggcctcccaaagtgctgggattacaggcataagccaccgcgcccagaccttttttttgtttttgtttgagacagggtcttgttctgtcatccaagctggagtgcagttgcacaatcccagctcactgcagcctcgacttcctgggcttaagcagccctcctgcctcagcctctcgagcagctgggactacaggctcgtgccaccacatctggctaatttttatacttttggtagacatggggttttgccatgttgcccaggctggtcttgaactcctgggctcaagcaatccgctggccttgggctcccaaagtgctgggattgcaggcatgatccactgcatacatcctgtagcatcatctttgccaaacaattaatccaaagatttagcaacatctttaccaaacaattaaactgggcatcacagtaatggacgagtggacatcatgttcctcctgatacaatgcacccagggggatagagcatcgcttgcatgggattcctgccaaaagtgcaggactccaatcatcaggaagcattagacaaacccagattgagaatcattctagtaactggcctatcatcttcaaaagcatcaggtcacaaaagtcatgggaaggctgagaaactgatccagactgaaggagactaaagagatttgacagggaaatgcaatgtgtggttctggatcaaatgggaagagagggcaggagtgaaaatacagccatcaaggatattacagggatgactggggaaatggaaacacgggctgtgcatcactcaattgacgttgagttaacagtatcaattcagtgttagatttcttgagtgagatcatagtattgtgattaggtaggagaatgccattattctcaaaagatgcatgctcaagtatttaggcatgaaggtcatggtatttgcaactcgtggtcacagagtgtcacaattattgttattattttattattattttgagacagattctggctctgtcatccaggctggagtgcagtggcacaatcttggctcactgcaacctctgcctcctgggctcaagcgattcccctacctctgccttctgagtagcagcgactacaggcacatgttaccatgcccagcttatatatatatatatatggagagagagagagagagagagagagagagagagagagagagagagagagtgtgtgtgtgtgtgtgtgtgtgtgtgtgtgtgtgtgtgtgtgtgtcttggtctgtctcccaggctggaatgcagtggcgcgatcttggctcactgcaacctctgactcctgggttcaagcaattctcctgcctcagcctcccaagtagctgggattggactttagaagccaggcatcagaatcatagaaggctagattcacaggacttatgtttcagcactggacacagaatctgagaagataaaaatcttaaagccatcaagtcagagactggatagggtttggattagaataccaaaatgttggctggtcgtggtagctcatgcctgtaatcccggcactttgggaggccggggtggatgggtcacctgaggtcaggagtttgagaccagcctggccaacatggtgaaaccccatctctactaaaaatacaaaaattaaccaggtgtggcggtgcacacctgtaatcccagctactcaagacgctgaggcatgagaatcacttgaacgcgggaggcagaggttgcagtgagccgagatcgtgccactgcactccagcctggtcaacagagtgagatgcagtctcaaaaaaataaagaatatcaaaatgttagaattctagaatcttagaacttcagacccttagtgtgtcaacatcataggggattaaatctcagaatcttggaaaaactgtgctgtttagggttctcagagatcacgtttagtttggagaaactaaggctcacaggtgtgaacctgtgggaaacttagaaaaagaaaaaggctttccttcttcaagacacttatttccataagtcagaaaactcttataatagaaatgcaaatctacaatgtccactatgaagagagcttcctcagatatggtggttttatgcagtgcacagcttcaacaactgtacatggcagacctgcctgctcagactgaggcaggaacttgcccaaggaacagggtccagggctaagctcggagtggaacccaagtctccttcctcccagtctttggcctaaggtaccttgataaggcaatgccaggcctcgaatgtcttccaggataggaaatcaaggaaggataggaagatgttgactcttcttagccctttggttccagcactgaacagcatttcctccttcacttcaaacatcttggtcctggccaggtgcagtggctcacacctgtaatcccagcattttgggaggctaaggcaggtggattgcttgagcccaggagttaaagaccagcctagacaacatggtgaaaccttgtctctacaaaacataccaaaacaacaacaacaacaacaaaaacaattagccaggcttggtggcatgtgcctgtagtcccagctatattggaggctgaggtgggaggattgcttgagcttgggaggcggaggctgcagtgagccatgattgcgccactgtgctccagcgtgagtgacagagtgagactctgtctcagacaaaacaaaacaaaaccacaccagcctgggcaacatggcaaaaacccatctttacaaaaaatatataaattagctgggcgctgtggtgcacacctgtagtcccagctacctgggaggctgagatgggaggatcacttgagtccaggaggttgaggctgcagtgagctgtgattgtgccactgcactccagtctgggtgatagagcaagaccctgtctcaaaaaacaataaaaaacaatcttggtcctgaggtcatttgtaagtgacaaagtgggctgttatcccaggaggtgacacctgtactcacttccttctgcaaagcctcagggctctagatggggacagtgcggaccaggggtgggtaggagtggaaaggtgaaaagatagttgaaagcaggccccaatatggtgaatgcagttccctcaactgagggcatgtggatgatatggtgcactgggagaggatggaccgagtggccaaagggatcccatgctgcagggtgatggaacaaagacctgtgaacagctgcattttgttttgttttgtttgagacagtgtctcactctgtcactcaggctggagcacagcacaccatgcacctgtagtcccagctactttggaggctgaggtgggaggatcagtttagcccaggaggtggaggctgcagtaagccaggaaggctggggtgggcagggtaggaaaggtggatggagatgggcagacaaaaggatcctggactgactgaggtggagggaaagacctgcaaatgtccaagcgctggaaagagaagtgatgagggcagagagggaagaagactggctacaaaaagcagccaggcacacagtggtggaactcaagatcgatgaaacagagaactgccaggtgcggtggctcacgcctgtagtcccagcactttgggaggccgaggcgggtggatcacctgaggtcaggagttcaagaccagcctggccaacacgatgaaaccccatctctactaaaaatacaaaagattagctgggtgtggtggtgggcacctgtaatcccagctacttggaaggctgaggcaggagaatcatttgaacctggaaggtgaaggttgcagtgagccgagatcgtaccactgtactccagtctgggcaacaagtgcgaaactctgagaaaaagaagaaaggaagagaggagaggagagagtagaggagagagaggagagaggggagagaagaggtgagaggagaggagagaagatgagcgaactgagtcccaggaagagaagggttaaagggatgagggattggctgctgcttgatggcagaaccaaagatctgggaacagttcagcctcagctgtaccccagggagaagattaaagggggatgtgtcaggctactgagcaggtagaacctctgaaaagctcagccattggccctctttctccctgtctcctgatttatttttcttcacagctcctaccactacctggcatttttatgtaatcagtgtttacttcctaactgcctgtctttcccaggagaatgtcagctccatttgggccgggactttatgagttttgttcaccactagtcgccggtgccagatctgtttgtttcttgcacatagtagacacatgataaatgtcattatgggaaaggggagacttgtgcatgaattaacaacacatactgttcaaagcatgatgtaggctggtgaaaatcattgaaaagaacatactgtaaagctataagtcttaaaatagtgtgtcatggacagaagaactacaaatagatgaattttgtgggccacatgaggacagagatcttatctatcttggttattgttctaggttgatcccctaaataaagacatctggcacacagtaggtgctcaggaggaactgttgaatgagagaatatcacagatttgcaaggagaggggtaaggagagggactggggctgtgagatatggtagagggtgatgggtgggttgctttatggcacaaccaaagacctttagccatcgtctctctcctccactcctattttattttcctccatagcacttattgccacttcaagtttttatatgtttagtagtttatatcctcattgcaatttgagggcagggaccttagctgcttgttcccatggtacacccattggcatacagtgcatgctcaataagcatttttactttagtaatggtgggagaaggcttgttctaccaggtagcaatacacataatggagctataataattaaaacagtgtggcaccagcacaaaaccacagaaatataaagaatgcaggaggagtggtgtgaagactgagagtttgtctcattcatcatgtgcactgaatgcctggaggcagcacctggcacatggtaggtgcccactaaacattaatgttcctatgcacatgaggagacagctgttttaccagacaataaaacacagaacatggccggatgatggctcatgcttgtaatcccagcattctgggaggccgaggcaggtggatcacttgaggccaggagttcaagaccagcctggccaacgtggtgaaaccccatctctctactaaaagtacaaaaataagccgggtgtggtggcacacacctataatcccagcaactcaagaggctgaggcacgagaatcgcttgaacctggaaggcagaggttgcagtgagcggagatcttgccactcactccagcctgggcagcatagtgagactctatctcaaacaaacaaaaacccagaggtagataatgaaggcgggaggtgtagccttcggatagccatgctctctgcctggcccagaggtgtgtgccccacgtctagagcagcgcctggcacaaagcaggctctcaggaatgaatgaatgaacaaatgaaccaatgaatcctgcaggagtcagttgggaggcgaagagcctggaggccgccggacggcgggacccacggcctgcgccagccccctgcacaccccccaccccgggggacccacctgtactcgtagtcggagcccgccttggcagagccgtcctcagtgcggtagtccacgtagaaggtgctgttgccctcgccgccctggcacgtgacggacagcagcacggagccgcagttctccaggcagtggtagaggctaggctcgaagaagatgcggctggcgccgtcgtcttcgtcctcgcccgcgccctcggccggcgccgccctgcgcgaggcgtccgccgcgtgtctgcgcagcacgttcccggcgccggtcatcagccgcgtggcctggatgcggtagaaggcgcggctcttctgctggtgcagcagcgcgtagtagttggcgatgcccaccagctgctccagatccttgtccgggtgcttctgcttgaggtccttgaggatctggatgacctcgcggcggctggcgtccagctcgcgcgcctcggcggggcccgggcccaggccgcccagctcacctggggcctcggcgcccacgaacgtgccgtccagctcgatgctcttcggggggtcgccctcggcgcctatgatgatgccgctgcgtgggtcggtgcggtagcgcttgtacacgtacttgtagaagagcagccgcttgtcggccatccaggcgaataccacgcacaccgggaagaagaccagggtcagcagcgcctcccacacctgcgggcggcgggcgtcagggcgaggccgggcgggccgccttctccctccccgcctctctgtctcagtctctgtccgcctctgccactcctcatctctctccccaacccccaaccccgccccgtcgtctctccctatccctttctgtttcttttctttctttctttctttcctttctttctttttcttttcttttcttttctcttccttcctttcttccttctttctctctctctttctttctttctttttttttttatttgagacagagtctttctctgtagcccaggctggagtgcagtggtgcagcctcggctcactaaaccttgaaccttggcctcccgggtcccggttcaagcagttttcctgcctcagcctcccgagtagctgggattacaggcatgcgccaccatggccagctaagttttgtattttttttagtagagacgggggttcaccatgttggccagcctggtcttgaaatcctgaccttgtgatcctcccacctcgagctcccaaagtgctgggattacaggcgtgagccctgtctctttgttcatctctgcctctccccatctctctctcctccccactccccgtctctccccacctctttctgactgttcatctctgcctccccccatgtctctctcccctctcccccaagttctgttccccccatttctctctctccctcttctttccccatctctctccatctcaatctctgttcatctctgcctctccctgtctctctttcctcccctctccccgtctctccccacctctttctgtctctcttcatgtctgcctttccccatctctctcccccgagttctccgtttccccccatttctctctttccctctccatcttgttctgtctctgttcatctctgcctctcccccacttctctcctcctcatttctctctcctttccgtccctctcttagtttctctcaacctccctcttgtctctgttcatctctgcctctccccatctctctccccccatttctctctctccttccccccatctctttctatctctgtccctccctttttgtctctgtttggctcttgcctctccccatgtctggacgtgtctccatgtcctgttatatcctggtagatctccatctccctcccttgtgagtttctttctttttctctctcaatacctgtgtttctccagagctaattttttcccctctcccgtcaccgtttctctctctcctttcccttgtccttctcttagtttctatttccctcttgtctctgttcacctctctctccccatctctctctctcctttctcccacccctttccatcttgttctgtctgttcgccccctctgtctctgtctctgctcatctctgcctctccctatctctccccacccccttttctctctctctccttgctcccgttcctctccatctctgtctctctgttcctcacttattctctatttccctctcatctctgttcacctctgcctctccccatctctctccctccccttcctcccatctctttttaactctgtcctccctttttgtctgtggcctctccccatctcccccacatttctctctctccatctcgttctctctctctctgtccctgttcgtctctgcctctctccatcgctctctgcgtgtgctgctgtctctttccctccttgcctctgtctcagcggttttcttagcctttcctcctcctctgtctctctccctggctccctctcttttcttgttgcctcggtctccttggctccatctccttcttttgtatctattggtagatatctatttccctcccttgtgagtttctttctctttctcagtatctgtgtttctccagagctacttttctctctctccctccctctctctcttgctccccatctctgtgtgtgtgcacgtgcgtgcgcgtgtgtgcgcatgtgtgagcgtatgtgcatgtgtatatgtgtatgtgcgtgtgtgtgtcctgtgtgtgcgtgcttgtgtgtgcatgtgtgtatgtgtatgtgcgtgtgtccatctgtgtgtgtgtccttctgtgtgtgtgcatgtgtgtgtgtgcatgggtgtgtccttctgtgtgtgcgcgcatgtgtgtacgtctgtgtgtgtatgtgtacgtgtgtgtccatctgtgtgcatgtgtgtgcatgtgtgtccatctgtgtgtgtgtgtgcgcacatgtgtgtatgtgttctctttctctcctagtctcttcatccatctatccaccttttagatgctgagaaccatgcccagctgcccaggtgccaggaacccggacatcctcatccactaccaagcaacagacaatccccaccctgtggtcccagctgctgtcaagggacagagcctgtgtgtcttctggcctctctctccctccatcttttttctgcctgctccatttctcccccatcacctgggggtgcctccacttctccaaacctcgcccatcatccagggcctgctctctgttcacccaaacgccctcagtgccccacccatgacccctaccagtgcctccttagcatttgcctggccctcatggacaggctgtgtctctaacagagacacacatctggctcttctgcctcataaaaccagttcccatgcacagccagggcagctctgagttgggagcctggctttaccacagggatggctgtctcatctcttggtctatacaatggggacatttccaagactgaatgagcacctgcattcctagtgcacagcattctcagtttctgacacatggaaaagactcaagatgtgaaattaacattgcctggccaagcgtggtggctcacgcctgtaatcccagcactttgggaggccaaagtgggtggatcacctgaggccaggagttcgagaccagcctggccaacatggtgaaaccccatctctaccaaaaatacaaaattagccaggcatggtggtgtgcatctgtagtcccagttactcgggaggctgaggcaggagaattgcttgagcccaggagggggaggttgcagtgagccgagatcacgccactgcactccagcctgggtgacagaatgagactccatcttaaaaaaaaaaaagaaagaaaaagaaaaaaaagaacatcgccatcgttattatttagtactattatcttgggcttgcagaggcctaagactcagtctgctggtggcccagcacaggcctggcacatggaaagcatccaccaagactcgagggtttgccttgaagatattcatggaaagactcaaatgttacctttctcatcaaagatgaagaagaaaagataaaagagtatttatgggccaggcgtggtggctcatgcctgtaatcccagcactttgggaggcggaagtgggtggatcacgagggccaacatggtgaaaccccgtctctactaaaaatacaaaaattagctgggcgtggtggcaggcgcctgtaatcccagctacttgggaagctgaggcaggagaatcgcttgaacccgggaggcggaggttgcagtgagctgagatcaccccactgcactccagcctggcgaccgagcgagactctgtttcaaaaaaaaaagagtatttacgatgacaaggcccccgaaggccaggcacagtggctcacgcctataatccctgcactttgggaggccaaagtgggtggatcacttgagctcaggagttcaaggccagcctggccaacatggtgaaaccccatctctactaaaaatacaaaaatcagccaggtgtggtggcgtgcgcctgtaattccagctattaggaaggctgaggcaggagaatcacttgaatctaggaggcggaggttgcagtgagctgagattacaccactgaactccagcctgggggacagagtgagactccatctcgaaaaaaagaaggcccccagagtatcttaaaaatgagcctggtaggaaaaatatctaagatccagttgccacacctgctatcactgtgtttactgctggctcagagaacagtcaagacttgcaaatagtaaaactgcatgaagccaacaggcagatttgggaaaaggagccgaatgttcagcgcaagctgtgaaatgaactctctcccttgtattaattgaacctaccattatgtatattgcaaggaagtctctattcatcagaagacaatcccaaacccctaagattttccttcctccctgcaggtcaataaaaagtgattctagccgattcacaatgtctttctagagcacccactaagaatgtgtccagcctgggagggcactgtgacattttcaggtctcagtggagcaggcacacccctgagacagagtattggaaatctgggggtatttatgggctgccatcatcactagggagggggacatggtcttggcctttcctggcctgatgacatccagcaactcatgggacagtcccacacaatacagaaatgtcccacatgccggctcatttcagaacctgccactaacattcttatccgcacgggacagtcccacacaatgcagaaatgtcccatatgccgtctcatttcagaacctgccactaatgttcttatccgtgaaaacactgtttatgatagttagaatttataactctgttttatgtatttctttctttttctttttctttctttctttctttctctttttgagacagagtttcgctcttgttgcccaggctggagtgcagtggtgcaatctcggcttaccgcaacctccgcctcccgggttcaagcgattctcctgcctcacgctcccgagtacctgggattacaggcatgcaccaccacgcccggctaattttgtatttttagtagagttagggtttccccatgttggtcaggctggtcttgaactcctgacctcgggtgatctgcccacctcagcctcccaaagtgctgggattacaggcatgagcctttgcgcccggcctatgtatatcttttttaaatttctttttttttttttttttctgagatggagtctcactctgtcacccaggctggagtgcagcggctcaatctcagctcactgcaaacttcacctcccaggttcaagcgattctcctgcctcagcctcccaagtagctgggattacaggcgcctgccaccatgcccagctattttttgtatttttagtagagacagagtttcaccatgtcggtcaggctggtttcgaactcatgacctcaggtgatccatccacttcgacctcccaaagtgctaggattacaggcgtgagccactgtgcccggccttatgtatatcttatatgaagtattttcctgtatggtttaacatactgcaaatacacttgttttaaatctcgtggctacctgctcctctgcctagacttcttgcatgcaatggtttctgatctttttctttctctgaagcccagcttattcattataaatagatgcctgcatctggctcccttgtcatgagggtagttgtgatgaagcatttccaggtggaaatgcagactgttctgttagaaaccttttcttttttttttttgagacggagtctcgctctgtcgcctaggcctgagtgcagcggcgcgatcttggcgcactgcaagctccgcctcccgggttcacgctattctcctgcctcagcctcccgagtagctgggactacaggcgcccgccaccacgcccggctaatttttttgtatttttagcagagacggggtttcaccgtgttagccaggatggtccctatctcctgaccttgtgatccgcccgcctcagcctcccaaagtgctgggattacaggcgtgagccacagcacccggcccagaaaccttttctttaggcagggcacagtggctcacgcctgtaatcccagcactttgggaggctgaggcgggcagatcacttgaggttgggagttcgagaccagcctggccaacatgacaaaaccccgtctctactaaaaatacaaaaattagctgacgtggtggaacacacctgtaatctcagctactcaggaggctgaggcaggagaatcgctgcctcagagcgacagagaaagactctgtctcaaaaaaaaaaaaaaagaaagaaatagaaatcttttctttataacacagtttggacattatactgactttttgggaagccaaatgcataggggagtttgttaatgaatagctaacatttactctgtttcaggcagactattttaagtctttccacacggaacaattcagttaatcctcatggtagccctatgaagtcagcactctcatgatccccattttacagttgaggaaactgaggcctggagaagataaggaacctgccctaggtcacacagtgagggaatggcagaggtgggatttgaacccaaatctctggcttcaggtgcatggatcaaactctgaggccacaagatctctctttgattacctaagaatttcatatcagcagaaataaaggggatgtaacaaaatatctgttatattctcctttcttccttttctttctttttttagatagagtctcactctgtcacccaggctggagtgcagtggggccacctcggctcactgcaacctccacctcccaggttcaagcaattcccttgcttcagcctcccgagtagctgggattacaggcgggtaccaccatgccaggctagtttttatatttttagtagagatggggtttcaccatgttggccaggctggtctcgaactcctgacctcaagtgatcttcctgcctcgacctcccaaagtgctaggattacaggcatgaaccaccacacctagcttcaaaggcctttctgaaagcctaagtcaggacaccattcattttaacagcaccttaaactgtacgatatatcactgcacacttttcaccatggcagatgggaaactctctcctctttctctctccctctttcaggagccctgtcttctggtgccactgtcctcccctttcctcactgtggcttctgatccctctgttatatatcctccttcacagaaaacccacaaggcatttttctatctctagcttcagatccttcctgggaagaaactgtaactggcagaaacctgacagataggcaaaaatagattacacacatgtgtgaatgaatcctggacacctgcaaataaattatgcatgtgtgtgactgaattaggccaggcccataaataaattatgcaaatgtaggaggcagtcacggggttgtgggaaatacattaggcaaacgttgtcaaggaagactacatagtatgcgagttaagacatggggtgagcgaaaggctaatgattatgagaatataggtataaattatgcagctgtgggtctaaattttgtctcactattggaataaattatgcaaagtggtcacagggcttatattgatgttgggttggatgggagtatacattacactgaagtggcataaattatcccaacatcagaaattgatgatgaataatgaatgaattatgcaaaccgtgattacatatctggcaaatggctaaattatgcagatgtaggtatatatctatgcgagcccatggataaattatgcaaattgcactaagttactcaagccaattagcaatgtcagaaaacactaggctggattatatgcaagggtagtatgaattatgcgaatggaggatgtcttattgcaaaagcgggaatcagttatgcaaaaggtagggagtgtaggaaaacatgtgaacatacgtagcatgcattacacagatcacaggggctccgttagtacatacaacacccttttgggagctaaaaggtgccccttccaagtgagtgtactgttcttaagtgcaaaacagtgcgtccctctggacaaataaatgtttgctgcaccctccagagatatggctgggtagcatcagcaggactccagcccctccagcaggacttgccctgtttggctcaattcccttgtgtagtctggtgacctgcacaaccgtacttggcagccctctcagatgtgagtgtgcatttctgcaaatacagcaatcaacactccaagccaagagcacctctctggattttgcagacacacatgcaccaagaaagcatctatgcgtctttgctcacctggaccacaccgggggaaaaaacagcaaggatgagataaagccagacataggcgaagatgctccaagaggcagtgacaaagaagactctcaggtgcttgatcttgcggctctcgccggctgggatgacgtagatgcacacggcgatgaccacaaacatgttgaaggcagcgctgcccacgatggtgcctgggcccagctcacccgcctggaagttgtggccgcagacttcgatgactgacagcaggatctcaggtgcggaggagcccagggccatgagcgtgaggttggacaccgtctcattccagatgcgaacggtgcccacgctggtctcaccgttggccttggtgatggtgatctccttctcttttgacgtgatgacctcgatggccgccatgaaacggtcggcgatgatggacactcccagaaacatgtagaccatggccacaaagtacaccactgcccgtgccgccttgtcacccagcgacgggtcgtcgggctcccacacgggcagcagcacccccggctggcagcggtaggacccctggcagccccctgtgctggtgtcgctgtcattggccgggggaggcggcagggagggggttggggtggctgccccggagcatgggggagccgccaggaggagtgtgacccccaccaaggccaggggagccatggggggtggtggggtcctatgggggaggaggaggaggtctgggtgagggaagcaaacctctttctgtcatacaaaggtcaaagctcactggggaaggagggttgggggagaagctgaggaccaatgcaggcaggatggggactgagggcgacagagacacagagagtgacagacagagacccacagagagagagagagactgaaagataaggacagaggaacccccatgcactgctggtgggaatgcaaattggtctatgcactttgggcaactacagccgaacaccacgtatcatgcaattcagcagttttgttcctcggtatgtgcctgagaaataggtccttatgtccactaaaaggacctacaagaatgttcatagcaggccgggtgcggtggctacgcctgtaatccctgaactttgggaggctgaggtgggtggatcaggagtttgagaccagcctggccaacatggtgaaaccccgtctctactaaaaatacaaaaattagctgggcagggtggcgggagcctgtaaccccagctactcgggaggctgaggcaggagaatcacttgaacctgggaggcggaggttgcagtgagctgagatggcgctactgtactccagcctgggtgacagagtgagacttcatctcaaataaaataagaatgttcatagcagctttatttataatagcgccaatcttcaaacaacccagaggcctatcagcagtaaaatggagaaatacgtttggaggatttgcacagtggaatattatagagcactgaaaagggagtgaactatttgctgctgcacccagcacatggatgaatctcacagatgtcacaatggctgaatgaagccaagcacaaaagcactcaaactgcaaaattcactgagaggcagggagcaggaggctctgagtttgttaggagattcaaatggtctccaactcggccctttgaaagctcttgctcaggatttgggctgtggcgggtgttgggccgtgtttgtctgtttcaagtggggctggggaggggttgctggagggtctcattcatgtccctccccaaggtggtagcaggcatcagtctctccagcttccctgtgtctgacctgaggttttccccaggctctataagtggtgcagttccttaggggctgtgacatctaagaccctgtgctgggctttctgtcccatttgtgggtgtgggggttctactgtttcattatttctctccctacctctggtgctgagtttgagtggctattaccgtgtcttatctgggtttccttttaaaacacaaatcgctggacacggtggctcacgcctgtaatcccagcactttgaggctgaggcgggtggatcacttgaggtcaggagtttgagaccagcctggccaacatggtgaaaccctgtctcttctaaaaatacaaaaaaaaaaaaaaaaaaaaaaaagccaggtgtggtggcgtgtgcctataatctcagcacttgggaggctgaagcatgagaatcgcttgagccagggaggcagaggttgcagtgagccgagatcatgtcattgcactccagtctgggcgacaaaaccagactctgcctcaaaaacaaaacaaaaccaaaaacaaagcccacaaatcagcttgcctcatccccctactgttcagaacccccgccagctcccatctcactcacagcaccagcgtcctctccagggcccgtgaggtcctgcccaacctggccccgactccctctctggcctcttttcccaccctctcccccttgcccagtctgcctcagccaccctctcctcccctctgctcctcagcctcaccagacaagcttctgccttggagccctggcacctgctgttcccccttcctcgaacacgcttctctatttatgtatttttgagacgggatctcactctgccacccaggctgaagtgcagtggtgccatcacatctcactgcagcctcgacctccagggctcaagcgaccctccctcctcagcctcccaagtagcgggaagtacaggcgtgcgccaccatgcccagctaatttattgtagagccgggagtctctatgttgcccaggctgtttttgaactcctgggttcaggtgctccacctgccttggcctcccaaagtgctgggatcacaggtgcgtgccaccgtgccccgcccactcttcccctcatatccgctagccttgctctctctgccctttcaggtttccactctgatgtcagcttccccaaacaccccatccaaaatgacaccctccccctctggggagcacccctccattccacaggtgagaggaccaaggcgcagagaggttacggaacttgcccacatcatccagcaccaactctggctcccaggtcgcctctccaagagtggccctgactctgagctcctccgccccaccctcatgttgccatggtaacccagtggcttatcaaaaagagaaggagagaggaagagaggtgtcctgggaacctccaccctcccagacccctctgccaccagcctcatttcttccaggggcttccatttgcttgaaaagttcttctgagagtctaacccacagcctgtccccaactcacacctacatacccatgggctgggagctggctcctctgggggagggaggcagcgtgttggcagaacttcccaagaaggagagagcaagcgaggagcatgcctgtgtgcgtgtgtgtgtgtgtgtgtgtgtgtgtgtgtgtgtgcaggcaagggtgggggagaggggtgattcttaaagggccaccgcacaattagccccctcagcaaggcccctaatgatacgtctaattagcagccccctaattagcaacaacttaggcataattacaaacccaccaggatccaaagcaaaggctcatgctcccttctccctccgcctccctggctttcaggagaaacaggggccagccgggagtcaggaattcttctaaagcatcaaaccaaaccccgctctctctgggaggaagcctcggcctgggaagtcctccctcaggtttaaccacctgtccttcctgctgcagtcctcaagagagaccacagccaggtgatgcgggttctcatgtccaccctcctagcccaggggctgggtcaagcacagcctagtgcaatccctttttcctgcaaaacctggtttctcgctggggccttgcgagaggagcagtcagggagagaaagcactagataaatatttgtgaaatgaatgaccaagaggtctgagccctgtcaccagggaccgtgggctccctctgctcctggctcctgcctctccctctccatccaccagcagccctgaaacccaatctgcttttagaatccaggggcaaaaggatcaggtggagcccagggtgggagcggggagggcagatggcaggtaccgtctcccagggccatctctccctcccttcgtgggcgtgcggccagctgggtcggcagtgagcacccctgttctgcctcacgtgcctcttaggtccttgatcagaagaacaggactgcatgcctgggggtgggtgcagtctggcgtgccaggtaagacccgtccttcatatccctcacgctaccaccccacagtggggcggcaagggagggtgcttttctgactgtgcctgtgttggggggctggcccttgcaggaccgagctggggactcagacttctaaacatgcacatttactgccccagcatgagcgcaggcgctcccatcacctcaaaatggtccagtgtggggatcacaccacagagcttgggtgctcgaggctgtgatacactgataatacgtaaactgaggcccagaggaggaacagggctcttaacctagtgctctttaaagccatctgaagccccctccgtgggcactgtcacacagggctgggacctcacctgcagccagggagacatcatacacacacacacacacacacacacacacacacacacacaccagggctacaggcacagcctcgtaccttttcgccatcactcactctcttgcccaccttctccagggcccccttctctcaaggaaggcagacagtgtgttggccagggccctctcagcaccccccactgagacagtgtgaggctggcacaccaggaaagggatggaagtgagactgcaggaaggactggcccggtctaactcagtacctagtgcttgcccagagcaggaaaggcgctcagtaattatcaacaagaatgaatgaatcaagagctggacaaacagcaagaggtatggaagtgagacggcaggaaggactggtccagttacacgaggaagactggggaggttagattgaagggaggtctggtctcatctctactacagaggctaccggttaaactgcaagaaggaccggcctcagaacgccagaaacaaggcagggggaggtgggctcggtcctcaggggagagctggggtgggtgccggctgggaggagtggagagagcaggggagctctgctgaagtggggagaggagtttagaggactccaggcctgggggagcccactctgcgggtgggggggtctaattcctccaggtcccccctgccaggggcggagacaaaggtgtgtgggaggagggtgcactggctcccagggagagccagagaagaggaaagagagagagaaacagagactgagatatccagagacagagatggagacgagggggagatggggagggagggagagagagagagagagagagagacatgcggacatgggaagagacagagacacagagaaagcagagacagagagagacacaggaaagctgagacaagggagagaggcagagacacagagacacagagaaacagagatggcgcaagaggaaaggagagagaaacccaggacttagagacagagccccagagagactccgaacagaccccggcacagagacacagagagagggagacaggagtgagagactgagagacagggactcccagaggcggccagactctgctagacagagacccctgagacatgtggagagacagaaagatgagacccagacacaggaaggcgggggcagaggtagagagcgcgagggggggtgccccagacggggtgggggcggggtgtcctcgccccccagtacccaggcggtccccctccccagccgcccgagaaccaggagggactgaaggtgttggggcggctggtggcactcccaccccacagaaggtacgcgtgctgggccaggcagccccccacctccataaaccagcccagggaagccagctccaggcttcccgaaccgcccccactccgcacctggggtaaccccgtccttttcccacgcccccacctccccaccaatggggtctcttacctgcggctacagcctggagcaggtccccccagcgctgggctggcagtggtgggcgactccgcccgaaagagagagagagattgagagagagaaaagcctgagactgagagggagagccggggaggaggggagggagaggggatagagggaggagaagaggagaggggagggacacgggggagggggaggcggcgagggagcgagggagggggaggagccggagagagggggaggaggcggaggcgggcagagggaaggcggtgcgggaggcggggggaggcccggggaggggcctgggggagcagggagcccgagcctcctccccagcctccgggttcagcaccagaggcaggggacagcaccggagggcgctcctgtgtgtttcagaagcagcccccgccccccaacacacacacacacacacgcacacacacacacgcacgcagtctcccagccatacaagggccaacagctacaaatagttacagacttacagaactagggggagggcaagaatgtttagctggagtcagatccaaattcacatactgtgcctgcacagcctcacaaaggaggccagaaacaaccacaaagacacccattaataagaataacaacagctgccatacatacaggcagccctgaccacgtgcctggcatcggcagcacattattattatttgagacagggtctcactctgtcacccaggctggagtgcagtggcacgatcttggcttactgcagcctcaacctcctgggctcaagcaatcctcctgcctcagcctcctgagtagctgggactacaggtgcccgccaccaccacgccaggctttttccctccattttttttttttaggagatgggatctcaccatgttacccaggctggtctccaactcctgggctcaagcgatccttctgccttggcctcccgagtagctgggactacaggtgcccaccaccaccacgccaggctttttttctcttcattttttttaagagacggggtctcactattttacctaggctagtctccaactcccgggcttaagcaatccttctgcctcggcctcccaaagcgctgagattacaggtgagagccaccgcacaggtgagagccaccgcacctggcatgttctaatgttttttataaatttaggtaaatgctattatgagcttcacttacagacagggaaaccaaggcatgaggtggtaaatatggctccagattctacacccttaactgctgcaccgcacaattccccaggctgaggacgggtcaggtcaagaagagacttgcaggctgggtgcggtggctcacgcctgtaatcccagcactttaggaggctgaggcgagcagatcacttgacgtcaggagttggagaccagcctggccaacatggcgaaaccctgtctcttctaaaaatacaaaaattagccaggccaggtggcacacgcctgtaatcccagctacttgggaggctgaggcaggagaaatcgcttgaacctgggaggtggaggctgcagtgagctgagatcatgccaccgcactctagcctgggtgacagagtgagactccatctccaaaaaaaaaaaaaaaaaagaaagaaatgaactgcaaagggccaggcaggtggcctgggctcctgaagacacaaactcatgcaccctgcgatgggcccacacacatacccccacgcaagcacacacctctgcaaggcacaccagcactacacccacccccaatcctgctcccccccacaacagggggtgatggcgtgttagtcggtgtggagtgctccttctctagaggcggacagtgggagggagggggccttgctcgtgccaccggtcctgcccactgccagtcctggctggacaccgtcaggcctgctggccaggggagggagaggatccggcttcctccaacttcccacgcctgggcctggcttctgggaaagagggtgaagacaggggtggccaggagttgctgagctcctaactcccataaacgctcggtagagaactggtggctgggtcttccctgtcagtgctggtggtcagacttctgagtggacctccatagcgggaggtagacagatggccaaaatgactacggtgtctgcctctcccctgaacccccaggaagcagatgtcctgcccaacccctgcccccagcctggatacggcccagggaatgatcatcccccaaccctgctgacccagattctattcctggcctgcagtggacggaggacaagacttccatcgttcccaccctccactgatcctagagacacaggcctctgattccttctcctggtaatacagaacggagcacaggaggccgggctcagtgactcacgcctgtcatcccagcactttgggaggccgaggcgggcagatcacctgaggtcaggagtttgagaccagcctggccaacacggtgaaaccctgtctctactaaaaatacaaaaaaattagccaggcgtggtggcgtacgcttgtaatcccagctactcaggaggccgaggcaggagaatcgcttgaaccaggaggtggaggttgcagtgagccgagatcgcgccactgcactccaaccagtgcatcagaatgagactccgtctctcacacacacacaaaagaccacaggcaaggcaactcctaccaccacaggctgggagaatcaggcttgtctcccactccctgggcccccaaccccctaggctttttagattaggtctaagcttagccctttccagcatggtctagcctgggtcttctccctgggtcttgcctcagtgctctccactgggaactaagctcactttctgctggggtttaaccctggccccttgcacaggatctggccatagcaattttttgttggggtccaacctcagcattattcatagggagtctagcctcagaccctctgctacaaatggaccactgctttcccacagcagccctttctacccacaagttttcctctaaacgctcaagctccttacctttccactgggatctacccttagatctagatctttccactggggtctcatgtcagctctctccactagggtctaacctcagctctttcccttccattttacgtaatctgttccacagtggtttaacttttagcctttctgctaaggtgtcaccccatttctttctcttgggttctaccctgggatctaacctccggcctgtatctgggtctagccttggattccctctcccccaaatccctctccctcaattcctctgggtgaatccagcatccaacacagagccaggcatacagcaggtgctcaccaaatgcttgccgaaaaaaagaatcgagacaactgggaaatgatgttcttctggacgtataaataaccatcaggtggccaattctcatccagagtggacagggtggaatgggatcatccctgctttcaaatagggacattgacgtacagagagaggagtgggttagctggggccccagggcacagcttcaccaccctggggaggtctggggagagcatcctgtccttcaggacaccccccaccagcggctggaggtgagcacgccatgagtcgccccaggtctgggaagagtgggtgcatgggtgcttaagaggctgcattctcagcaggccctgcacctgccccgtcctccaacccctgtagccgacgtctcctctgctccacttgatgtcgaagccgggtcaagaccagctctgaggcctgaatcaggctgtgctgtggggaacaagagaatgagggggatggagctgaggaagagctgtgggaccacagcgggaccgtctggagtgaagcaactccaaaggccaggagctcggcccacgtgggagggcagagagcagaccacagtgtgtgggatgggaatgggcctctgtgacaggggtgaaggggagtggccttaagcgaatttctagtgggagggacaaagcctagacccaaatgtaaggaagtgagattagaaggaatataaaaggaatataaaatttagccaagcttggtggcaggtgcctgtcatcccagctactagggaggctgaggcaggacaatcacttgaacctggaaggtggaggttgcagtgaactgagatcacaccactgcacaccagcctgggaaactgcactccagcctgggaaacagagcaagactctgtctcgaaaacaaacaaacaaacaaaaaaaccaaaaaaaaaaaaaaaaaggccagggtgtggtggctcacacctgtaatcctagcactttgggaggccgaggtgggcggatgacttgaggccagaagtttgagactaacctgggcaacatggtgaaactccgtctctactaaaaatacaaaaattagctgggcgtggtggcgtgcggctgtatttcccagctgcttgagaggctgaggcatgagaattgtttgaacctgggaggtggaggttgcagtgagctgagatcgagtcactgcgctagagcctgggtgacagagcaagactctgtctcaaaaataaaataataaataaataaataaatctccttcaccaggccggtgcccccaccccagctgctgtgagcgctcacagctgcccctttctcctgggagttgtcctgactggtaggaactgcctccctgaaatgagttcctccctcccccaggaggaggcctgcaccccctgctcgaaactgctgaggtcgactcccctcccaccccaagagctggggatacctgcaggatgtgcacgcccttcagggagaccacggcaagctcctgcagcccatccccggtcaggtccacgtgagccatggccagcaggggactggagaagctccgctgccacagcagatggaacccgtgctgggcctcaggaagccccgactctgggccccggtacttataacacagcagttcctgcgggggtgaagaatcaggtcacacaggttgatggggggacagtggagggaggccggtgggtgtggctccaactgtcaggtcccacctgtccataggtggccaccaggacttctggccgcccatccaaatccacatcggtgaccaggctgcagaggacgctgtcaaactggtcactgccgggcaggagaagctggtcttcaagaccccggttcagcaggtccctgagggtcccaaatacagcatatagactggggtcagcttgcagtgcccagcacccttggcggatgctaagctgggtaccggtactgcttcccttctcaggcctagacacactggtcctccggaagcctagacatcatcatctcagatttggacatattcatagacccagcaaggggtcaacctgtgcactcaagcccttcatctcggagaccatctcactcccaaatggaaagccacagtgtcccatctgaggattcagatgcatgtgtcctcaatttagacacccacgctgccttcgtggagcccgaagagggcttggccctggcctggacaccttcaccacccctagaggggtgccagagctggctatagttgcttccgagagctgactgggaaatgttcccatgtaatcatgttcatggtttgaaagccaccatggtgggagtatttacactttggaaactctggtaaatgctacaaacctgggctttcctcgtgcatagccagtgattaaccattttccagcatacctactacatctactccagggggcacaggcatctctgctcccaccccccagcctcaacatattccctacaagtctagacttcaatattcacagcccccacccctgggtcacgagtatctgtacttgtccagctctgggtaatccacccagaggaacttactgtagagaatgacaaggttagaccacagtgcaaagaaagaaggttagaccacacccatgtgtctcaggccccctcaccgatacaccactgctggctccaacatgctggccacgagcacgctgtactcatcttgtagtggcctgtccttggtctctggagaagaaacatgaatggtaatcccagcactttgggaggccaaggcgggtggatcagctgaggtcaggagttcgagaccagcctggtcaacatgataaaaccccgcctctactaaaaacacaaaaattagccgggcatggtggcgggcacctgtaatgccagctactcaggaggctgaggcaggagacttgcttgaacctgggaggcggaggttggagtgagccaagatcacaccactgcactccagcctgggtgacagagcgagactccgtctcagaaaaagaaaaaaaaaaaaagaaacatgaatgaataggggaaaggttttgtggggacaggttccaggctcctcgtcataccccaggcccctttaatgagagacatgcaggttagatctcaggaaaaagtcttgaggctgtgctacacagggagggttagagattggcccatgagacaaattataagtcagacaccagaaggagaaataggtgttagatgatggcttaaaaagtctgaggttctgggtgtggtggctcatgtaatcccagcacttttggaggccgaggcaggcggatcacctgaggtcaagagttcgagactagcctggccaacatggtgaaaccctgtgtctactaaaaacacaaaaattagcctggcatgatggcatacacttgtaatcccagctactcaggaggctgaggcaggagaattgcttgaacctgggaggtggaggtgatagtgagccgagattgtgccactgcaaccagcctgaccaagactctgtctaaaaaaaaaaaaaaaaaaaaagacatttgtgcatgtatgtttacaacagcccaattcacaactgcaaagatgtggaactaacctaagtggccattgactaatgagtggagaaagaaaatgtggtatatatacaccatggagtactactcaagtcataaaaatgttgtcttttgcagcaacttagatggaactggagaccattattctaagtgcagtaacataggagtggaaaaccaaaaaatgtatgttctcacagaagagggggccaacctatgagtatgcaaaggcatacagagtgtataatggtgtttggagattcagaagcaggaaggtgggaggcggtgtgggatagaagctacacattaggtacaacggacactagctgggtgatgggtgtgctaagatctcagaatccatcactatagaattcatccatgcaaccaaaaccacttgtgtccccgaagtgattgaaataattttttttttcttttttgagatggagcctggctccgccacccaggctggagtgcagtggtgagatctcagctcactgccacttccacatcctgggttcaatcgattctcctgcctcagccttccgagtagctgggattacaggtgcccgccaccacgctccactaatttttgtatttttagtagagacagggtttcaccgtgttggtcaggctggtcttgaactcccgacctcaggtgatccgtccgcttcggcctcccaaagtgctgggattaccgcgcctagtcaaaacttttttaaaaaagcaaaatgccagtcagggacagaccccagtaaaggagcaggaatgatcaacatattgggggaaaaggctagactctgagtggtgggacagcggtgagtccaggagcatagccgggagctagaatgcaacaagagacacagtgaaggggccacagagcggggtgaggaaataccgatgtgagacgtgcaggttagagtacagagggagaggtggatgctcagccccagggtacggggctaaggttacaccaaagtgaggagaacaactatggaccctaacagaaaagatatgggttaggccccatgtgccagtcctggaagttaaattcacaagaggggaggggagggaagaggtgcactgtagctcaaggcctggagtgggggatccaggagagagggactggggtctgcacactttgggagaggggtgcaaatctgggtagaaggacccaagaatgcagagttgcctcttccctcccacccgctctctccccatcccctcaaacccagagctcacccttggcggccgagaggctgaacacaatcactcgggagatgggaccgtcctgcaggaccgaccacatctgcagaacctctgcgtggagagcgaggattcagagccccaaccccaccccggtcccgcccgcagccctgaaaccatcgactttccgcccccaccgttcatccccaccctagccccgcccctctgaagccctcaaccccaccctagccccgcccccaatccccaccctcatcccttcccccacttcccctacctcacccagcaatagccctcggccccaccctagccccacccggcaagccccaccctcatccctcaacccacttatcctcctcccctaccccacccagctccagccctcagccccaccctggccccgccctctagccctcaaccccaccccttaccccgcctcaccgcggccctcacctcgactccgctggtccacgtgggcgacacggacataaccactctgacagcccagagctgagaggcgccgggacgtgccggggaagttgtggacgtccagccagaggacgctggcgggcgggtggatggacaggacggacggccattgctgggcccagccccgcccctctgcctccccaggggcagccgcccctccctgtagccctgggaccctgctgcttgattcctcctggataatccccaccgcccaattcctctgaggtcaattctcaccacccgagggctgagtccacctcttgttttttctggggtcacccctgctgatcaatttctctgaagtcatgccgtggactgatttttctgagctcctccccggtgaccaatttctctaaggtctcaccgcccgatttctctgatgtcagtgccccggtccccagtggcctctttcggggcctctcctacctactggtcaggttcgtcagctctgggaagaggttttccacgggctgttcctcaaactgatgcagcccctcgttctggggaaaccaagacccaccccacccccgcttaagtcagccgtcagcttcacacatatacccacccagcgccagcccacagtgaatcccacagggctctgcccagcacgccgccccacctcacctccttgtagagatgaatggccgggtcgttcccactcaagagaaacacagtctcaagttgatccccgacctggaccctgaaagcagagaaatctagaacccaaggtagtggaatccacatggtctgagaaccagaactctcctcttgcaaaaacccctgcctgttgagaaccttaacattctgggatccagacactagacccagggttagaatctcagggctcaagctcctgagtactgtatctccttgaaatacataactgtagaaacgagccctcatagaatctcaaaatcaaggaatgtacctcccaatctcagaattgcgggaacatggcttgctagaacctcccgctcttagagcccgcatctactcctaccttcactctgtggattcaggaatcgaatgtggaactctagaatgaactgcagaaccttagaaagctaggacctcttcattctgaaaccctggtattctagaagtgctgttttctgtctccttaaaaatacaagaacttctagaatttgccatcatagatttcagattcacggaatgatagaatatccaaatcctagcaaggagaacattagtgcaattagaatcttcagttttggggactctcacctgttagaccagaggttggccaagttatgacctgcagaccaaatccaacccaccatctgtttttgtaaataaagttttattggaacatagccacatccattcatttatagtgtcaatggctgctttctggctacaatggcaaagtgagtagttgtgacagactggccctcaaagcctaatatttactatctggatctctaccaaaaaaagtttgccaatccctgttctagaccatctgtgttctggaatggaatctggaactctagaatggaacccacacactttggggttctagcaccttggtattctagatgctctatgttctatctcctcgaaagatgagaatgtcaggactttatcattacagaacctcagaagattctggcttctatcgtactgtagaatattcaaatgttggaatcttagagcctacgactctagaaaacttagcatctctgatcttggaatgtcagactctagaacattagaatctgggaattctagatgtgcagaattcccagaattcacaggtgctccatcaactctctcagattatctagttcaggaatggcagtgtggtggccccttggccatccggtccatggccaccttaaaagcatgatgctccggccaggcgtggtggctcacgcctgtaatcccagcactttgggaggccaaggcgggcggatcacctgaggtcaggagttcgagactagcctggccaacatggcaaaaacctatctatactaaaaatacaaaaattagccgggcatggtggtgtgagcctgtaatcctagctactcaggaggctgaggcagtagaatcacttgaaccagggaggtagaggttgcagagatcgagccactgcactccagcctggcaacagagcgagcatctatctcaaaaaaaaaaaaaaagaaagaaaaaaaaagtgcaatgctttaaaaaacaaatgtagaatctgattgtctatggacaagttcgtggtctccagttagctacagctttccaacctcagctgcatatgtgtgtgtgcacatgtgctccctgttatattacatttgtgctttccattctcacatgacctctctggtccccaaaggcattttagtttaatttcattttattttatttatttatttttgagacagagtttcgctcttgtcacccaggttggagtgctgtggtgcaatcttggctcactgcaacctccgcctcccgggttcaagtgattctcctgcctcagcctcctgagtaggctgggattacaggcacacaccaccatgcccagctaatttttgtatttttagtagagacggggtttcgccatgttggccaggctggtctcaaactcctgacctcaggtgatccgtctgcctcagcctctcaaagtgctgggattacaggtgtgagccaccgtgcccggctggcattttagttttcaatccctaatctagtacaacctctttattttccagaaggggaaacagactacaggggtctgtaagtaaagaaggggttcgagaagccagggtttctacatttacagtggagtgggcgtcgatgcgcaggggacactcactccgcatggcacagctggaacggagtgaactggagctccaggttcaggcagctctctgtaggcagggcacaggcaggttagcatgggggacctgctggggactctctccctcctcccgtccacgcctcactcacgggcaatagagtcaaggttgtactcagagccgggctcgtagtcgcagtaaatgttcaggaaggggctgcccttgtcccctgaatcctggcggaggacacggggttcaggggagggcaggggtggcaggagggatccggggcggctcagtggaactcaccatgtgtgtaaggaggagggcgaagggaggtggagggggctctaggtaccttgatgaacgtgatccccacaaccagaccccgcttggggggtgacttgttgaaagtgtcgatggagacaatctccgcatccactgggaggggagagttctaagttcagtgtcaggcagactcatgcttccaatctccccaacatggtgagctctggctaccgcaatgatcatgccctctggtctgagtcctgaccaccatcacctgatctctgttccctgggtactagggatcctgacctgtaagtctgaagaatcctgaaaccctaggctcatccgggccccaactatgcctgcccgctgatcccagtgacccccttaaaaccacctgatcccattcttccagcacggtgacccggctcagacagagcctcagaagccttctcaacaccacgttccaggcccccgccccccagcaccatagcgccacccaccgggaatgtagttgaactgcagctccttggccactggccggattttctgtcggaggtcttggtagcggaagccgagcaccttgcctttaagggtggcggccagcagctccccgcgcccgccggcgccgcctgccagcccgtacacattgctctgcgacgagaagcgcgtgaagctgtcctcgcgcaacggacaaggccccgcggccacggccgcctcccccatcatgcccctcagttaagcaccctctccgcagcccccgccccaacccgcactacccaacctacgactctctaagcgacctgaaccgccgggtgcccggccgttgcgcgggctgatgacgtacggaagctgccggcgttgccctctcccaagatggcggccaggtcgcctgctcgggcctcccaggcgactttgccccactgcgcccgcgctctcttctcctttccatttctggaccaaggggctgccataaggagtctgtgactagagatgggaggtggtggccacggcctctcgctgtatgctgtgtggaaggtcgaatcatcatcatcataaaacttaatattgcccttatgtgccaggaactactgtaagtgcattccatctaatactttattaaaaattcgcaagggggtggaggtaggtacttaaatccattttagagatgaaggaattgaggcacagaggggtaaagtaacttgcctaagatcacacagctagtaacgagcggtcagtactggaaaccaaacaaggtaactccacagttcactattttttttttttttttttttgagacggagtcttgctctgtcaccctggagtgcagtggtgcgatctcggctcactgcaacctctgcctcctgggttcaagcgattctcctgcctcagcctcccagcagctgggattacaggcgccaccacacctggctagtttttctatttttagtagagatggggtttcgccatgttgcccaggctggtctggacctcctgacctcaggtgatccgcccacctcggcctcccaaagtgctaggattataggcgtgagcccccttgcccggcctatagttcataatcttaacagtatcacctttaaaataattaatacattcttcttgcccccaaggaaaaatgatccagctataataaccacctcctttatcgaacacctacttggtgacagtcatgctggctctgataatctgattccttacaactgttctgcaagggcctactgttaccctccctgccggttcacttattcaggattcattgagcttttactatgtgcccggacgtcctttgcaaatctgtctcactaatctttgcaagaaagaaacctctacaaagaggtttattatcccagtttagagagaatcaaatggaggctcagaaagagtaagtccactgactgatatgctagcaagtggtggggacaggatgtaaaccaggtgtttccgactctggggccttcaggggttcctgtctgtgctgctttgtccctagaaggccatggaggtttgggtactatgtgcacatctgtgtatcatttccagaagacatgggttggccagctgtcctggacacctcgagcacacacagactgcaagctccatgaaggcagcaggctgatctcccttgatcacggccttatcgcctgtacctggaacacaaggcctgacacaaagcaggcattcagaaaatatgtgtcaaaaatcacaaactatgtgctgagcatgtaagagacagctcttacatgatggaaagttctcaaaggcagactggataacggaggtggcaaggaatttgtgatgattccagatttctggatgtggagagtagaagttcctggagggcagtctgggaatgccgtcagtgctgctgtattcccagggcctggcatgcagcaggtgcttagtgaatattcgctgagggagtggcacgtgggtctagtgccacttcagcagtgcgtttccttcaggcgtcttcccgccctagtaacctataagccacatgttgagcggatgaatgaaaaaatgaagttacaggttaggaaggaatcatcctgttaagaggtttccaatcctagctgcacacttgaactgcctatgaagttttaacaaaacaaaccaaaacaggccgggcctggtggctcatgcctgtaattccagaactttggaagctgaggcaggcggatcaactgaggtcaggagtttgagaccagcctggccaacatggtgaaacgctgtctctgctaaaaatacaaaaattagctgggcgtggtggcgcacgcttgtaatcccagctactcgggagactgaggcaggagaatcgcttgaacccgggaggcagaggttgcagtgaaccaagatcgcaccactgcactccagcctgggcgatagagcgagactctgtctcaaaaaaaaaacaaacccaaaaacccccaaagggtaggaaacctcagtcaaaccacaatttatcagagtgcggccccagtctggatacttttatttttgcaccatcatgcctaatttttgtatttctagcagagacagggttttgccatgttggctaggctgctctcgaactcttgacctcaagtgatccgcctgcctcggcctcccaaagtgctacgattacaggcatgagccacagcacccagccccaagtctggatacttttaatgactttaaagcatagccagggcggaccatcactgatttaggtcatggatgacagaaacagattctcacactatccttcagccagcacccatgatgggggcagacatggtaatcaatttcaggtctcagaagtctttgctgccattatcagtggactggagctgtgggagaagctgcaggggagagaggagcagggcaggtgtcaaggaatttgaacctcacctgcacttctctaggctttctgggctggagcccctctcccaggagtccaccctggtttcctaggcagcccctcctctgtgcaattactgcccctgctcacttcctgacattttcccatcatgcctgggcactgagcctccttcagctgtctcctctgtagcgaggggccctgcgcggggcagggtaaagcacatgtgtaccagacagggcccccaacatgcacattgtggagtgtggtggaggcagctggtttctgcccacctttcctgggcaaaggctcctgctatctcctcccccactccccagacccactcgggcctcagactctgcccaccaaagccgcttcctcccccgtcctgtgacagatggaacaactgtcaccggggcgttcagccttcctgccagagaaatgtggacatgggagattcggtgggcttccacccattctcatccaaagcagtcatgaggaccgtcacattcgaccctcccactggctctgaggggtggcatcaccaccgtgcatcccagttgaggaaatcaaggcccctggaccccaagaacccagagaaagatcaagatgggcgctctgggactcccaagccagagctcctccccaggcccaccgtccctgggtctcccccacctagaaactgacccagcccacacgtgtttcaaggatgcatgcgcctgacctcccaagagctcgcccagagtctgggggaccaggagtgtgagagggactggtgactggcccaggggcagagtgggtagcagaggtgaggaggaagagagactcatgcaaaagtgttgttttttattttctttcttgggccagctgcagcttccaaccaagaaaacctcaaagcattagggaaggagcaggtgtggggctggggtggggagaatcccctaagctccagggcccagggtctaacctgagaggtcggggctgcaggaagctgggggaggctcccggggctgggggaagaggagcctgcccccagcagaaacagcaggtctcagcggctacatgtgctttagagcttggctgggggacaaaagtgggagagagagagaaaccggcctcatgactcagctggtcaggagatagggggccagatgctgaccccaaatccccggcagcacccctagcaaataggtctgtatcaaagattctgtacagctggttttgggggtgaagggcacctatgggggcttaaataaatggacagggggcaagggatgtagcgagaacagagggtgactgtccggccagcagcctgggcctctggcgcccctgcatgctgacccccggtgccacctgcccactgtggcccgcggcactccccagatgggaaaggagggaagctctccagcaagtctcggccccacctctctctgagcagatgggacaggaagacgggcactggggggctgggtggggcttagcgcaggtcctcctcatcgccctggatggtcttcttgatgcgcagcagcatggtggtgagccactggtccagccgggagatggagtcgtattccttcacctgagggcacaccaggtgataggctggccatgctccccccgttcccaaccctgcagcccaagggcacttgtcccaaggttttcaagatctgtctctgtcacccctggtctctgaggaggagtagagggagggcttgaggccccaactcagccatgggagctccctcttgtctgtcttgactatgctgggcacatcatttcccttgggggagaaagatattgtagctttaaaaaaaaaaaaaggtccatggctgggcgcagtagctcacgcctgtaataccagcactttgggaggctgaggcgggcggatcacgaggtcaggagattgagaccatcctggctaacagtgaaaccccgtctctactaaaaatacaaaaaattagccaggcgtggtggtgggcgcctgtagtcccagctactcgggaggctgaggcaggagaatggcgtgaacccgggaggcggggcttgcagtgagccgagatcacgccactgcactccagcctgggcgacagagcgagactccgtctcaaaaaaaaaaaaaaaagtccagcatcctcactgaatgggtgggaaactgaggcctggagatatggaaaaggccactcctgagtgccatgggacacgggggagagaagccacggcctgctgggcatcccctccctgagctcctggctgagttgccacccactgtctggggcaggaggaacaggatggcattttcactgtcctcagttaggggcttccattcccaaggggcacctagggagaaatgcttgacatgtgccattagaggagtgaatcaggacctgagccggacaccactaagcccgggaatgctgggaacagagaaagggaagggagagagagccgcgtgggcggctccaccaggcagagggaagctggcacctctcccatgtcctcagctccactctccttctcaccccttccctccccgtctgtgcctcctgggtgcccaaggcgcccactgtgagtctcacacactcacctgggggactcaaggaaccctggtcttcagaggcagacagatgtggctctgaacaccagctctgtccctgaggggccaaggccgagcctcctgacctccccaacctcagtgccaccatctataaaatggggagaacactccctgcgcctcttggcgctacttgtaaggtttctggggtgactggagaaagaacttcacagtgggctgggggccagatgaaatgggtgaatgtcatggagagcgtgtctgagaagggcagctttcctaggagacccatccccgtgaaggggcctggccccccatgctggccactcaccgactcggtgtagctgtccacattctgctcctcgtgggcctctagcaatttctgcaagcaaatggcagagaggggtcaggggcctatgctgacctgaggtctggcctggattagatgaaaggacacgctatctgtatgccaggcctggggctggggcttcctgaggactctcagagggtcaatccgtgtgggttaaactggggatgggtacgggcgtgttgcgatcctgctgccctattcatcagaaacggcttgctctcagggcaaccttaccaacatagaacatcacacagaatgtgtgtgtgtgtgggtatggggggtgtgtgtgttgggtgtggtgtgtggtggaggtgtgtgtgtgtgtggtgtgtgtgttggggtgtggtgtgtaggggcacgtgtggtgtttggtgtgtgttgagttgcgtgtgtggtgtgttcggtgtgtgtgtggggtgtgtgtggtgtgtgtagtgtgtgtgcaatgtgtgtgtgtggggtgtgtcatgtgtggtgtgtgtgcagtgtgttttgtgtgtgggggggtgtgtcgtgtggtgtgtgtactgtgcaatgtgttttgtgtgaggggtgtgtcgtgtgtgtgtagtgtgtgtgcgatatgtgtggtgtgtgatgtgtttgctgtgtgtggtgtgtgtgtagtgtgtgtggggtgtgtggggtggtgtgtgtgtagcgtgtggtgtgatgtgtgtggtgtggtgtgatgtgtgtggtgtggtgtgtgtagtgtatgtttggtgtgtgtggtgtggtgtgatgtgtgtggtgtggtgtgtgtagtgtatgtttggtgtgtgtggtgtggtgtggtgtgtgtagtgtgtgtgtgtgtgtccacctagccatcctgagctccagcactccccgagttgtactttcttcatctggaaaatggagactcaaatggccaaacaaaacaaaacaaaacaaaacaaaacaaagacaccctctgagaactactggacaagtcttggcgattgtcccacctggagccccagccacccccgtctgaggttcgggaagggggaggccggagcacccagcacttactttcatcaacttgcattcccgggaatcagagaaagctgggaacagctcctcatacttttggacagccagctgggcagcagggaagggagaagatgagttagtaacaagagggtcctcagagctactggcctagcagctgaggggacttggggatgtcgggtgatattgagtcagctcttgcacccctcccccagcctcaggtgtcacctggctctgtgtctgtcagtaccttcccgtagctgagctcagcaccagcctggctgcagagatggctgcagggagaggtgggtggagggggaaggttccccagataggcacccactgcctcctcccacctggctcagctggggcaggggacaaatgagcacatcctccatgccaggcctggggctggtgcttcttgaggaccctgagagggtcaaatgacggtgagcccccttttcaaagtgaggaaacagatccagagaggggcagtgacctgcccagggcacggtgagacatggggtgggaatgggaacctggtctgacaaagcccaagcttttgcccaccaccggtgcccacagcagggcagggctctgtggggtgtgtgtgtgtggggtgtgtggggccaccaccccaggccgtgagccagggacaccaggaaatcctggactccgtgcttctgccaggcaatggtaaaaaaactccggccaagcaaaatctagcgccaaccctccagctccttcccgctggccacgccccctcccactgccctctttggcccctcttttgccaagtgtcctgaaaataggtgggcatgtgtgagctacagctaaagccacgacagcaggagtcacaaagatctggaacactggggctgcaggtccctagtcatgtggcctcaaacaagggactctcgtcccagcctcaccatcttcacccataagacgcggtgacaatggtgctgactttaatggggtgcagtgaggattcaaaaagtgcacccatgaaggaaagagcactaagtgaggcaggagctggacccgcaaaagcctccagggctgggtgggcaggtgatgccagcacagaaacacagctgtgagaaccacacttctcatccaaaggctggctggcaggggccagacgtgagggaggagcacgtccctcttcgggggcaacgggacctggcctggagataagcacatggtggcctggtgcggtggtcctgcgggcgtggggtgtgctaccttggcgttgagcatgtcgatgcagaagtggcagagggccgccttgaagaagtagtctttggcgctgtacttgaggagggggctgtccatggcattggtccccacctgtagccatggagaagtggcactggtgagctcagggcaagcagccagagggccagagccactgccaggcactggggggccagctgggagctggttcatgtcccgaggtgaggccctgttaacccaggaccccaagggcagggagccagggaccagcttggagaggtcagcggccagtgcgtgagcgaccaagatcagggtgtgatggtggctgggtgggggtggaggctgtagccaggtgttcgtgggccttctgagagcctgagacagtgggaaggaggcagcctggctgtcaggaccaacgggaggctggcatggcggtgggcagagcggcggcaggcggtgggaacatgagaggcggcgcccgcccctctctcccagggggccagctgcctgcctttttctcggccatcacccagggctccgtgcacgctggggggaccccatgtgacactccctccctcccactgtggatgaggaccatcgggccatggggtggggtgcccacggccaccctgggcctcttggcacttcttcccattccctccctctgggttctttagccagcctcactctgggcccctccaggaagctctgcgaggggtgtgggaggggcacagccagggagagagacggtgctggcacggcatggagtcgtaggtggagaacattcagccaggctgaagacagggtggggggatgacatggcaagggatgtcgggggagaggcagagggtgagccgggggaggggtggttccagaacaaggtgccggggcttaggaggaggcacaggccctgagagggggcagggtggaagccgccatccccacctgtccccacctgttcgtagatgtcaatggccttctgatactgctccagcagcgcagcgtaaccagccaccttcagcagacacttgttggctgagctgtgtggggaggagtagtgaggggaagtggtggcggtccctgcggggctggggcaggcaggaagggggctacctgttggactcctcgcctttgtagtagtctgcagactgctcgtagtgggcaatggcctggggagacacgggggatgggttccaggggagggcagggaagggagaggaggcctccgtgaagcttccacaccctccgccctgcctgcctgggacacagccagaccccattctccaagctctgccggcgccccatgcccccttctcggcactcagacaccagaggactcccctggtgggaagaagagagagcagcactggtcctggctgccagcccatgcagggccctgctgccactcaccttctcgatgtccaccaactctgtctcatagatctcagcaatggagatgtggtgcttggccgcaatcgtgaatcggccctggaggggacacaggaaggggctgcctgcgactcatgacctcctgcgtgcctgcctgctgacctatgacccttcaagttcccacccctcagccacgcctgtgaggaggtatgaagaagacctgaggtgtgaagaagatcgagaggtgggggaacacaggagtgagaagggagggccccagcactagaggcctggctatgcgtgctgggctgagcgggtgatgttggacaagccactccagggccttagcctaattccatcccatccacgagggcacagatggtgtgacaccagagagaatgtgagcacgagcacttggccaaggccctggcccttaggaagcctctgataacagccagagaggcggaaggaccagtccagagccacttggcaaagggctctggagaaaccaggatgggagggagggcttgagacctctgcccaagagtaccagctctgcccccaggccaacacctatctgtcagcctcccccaggcacacccagagctccccagggaggcctcaggttccaaggggcctcgcaccttccatccgcctccacccagtgtccaggcgcttgcctaactgctctgcaccaggggctggtccaacgccacccccttgctgagggcagtaggaaagggcaaggccctgggctcagccagaccttgtttcgggtctcagtgactcctgcttgtagccacatgtccctgggcaaatcatgtcacttgtctgagcccctctcctccactaaggaacggggatgacaataatgccaacctcacagggctgtggattaaaccaccctgcagtgtctggcctaataaatggcagctgctattattgttctaatcacagtcatccctgcagcactgccctgaacgcaaggggtagggctcgtgtccctgcctggggttggagggctgagacagacagggcaagcggagaggcaaaaaggagctggccaggcacggtggctcatgcctgcaatcccagcactttgggaggccaaggcaggtggatcacttgaggtcaggagtctgagaccagcctggccaacatggtgaaaccacatctctactgaaaatacaaaaattagccaggcatggtagcacacgcctgtaatcccagctactcgagaggctagggcacgagaatcgcttgaacctgggaggcagaggttgcagtgagtggagatcacgccactgaactccagcctagatgagagagaaactctgtctcaaaaaaaaaaaaaaaaaaaaaaagagagagagagaaagcactgacaggagccccggcctgggtgggacccttcactctggctccagttggcagctgcccatctggtctgcatctgtcgttggcaacgcgccctgggggcagggcaggtgctgagcctcctgtgggctctgcctatccctgtggcctgctgcaagatgcttatcaaatgtgacacttgcgggaaggctgggcaaggggaagtgccggacacacactctccagtaacctaatttctttttttgttttgagacagggtcttgttttgtcgcctacgctggagtgcagtggtgtgatcacagctcactgcagcctcaacttcctggactcaagcgattttcctgcctcaacctcccaagaactaggaccccaggtgcatgccactacaccaggctaatttgttgtagagaggaggtcttgctatgttgcccaggctggtctcgaactcctgtgcccaaaagatcctcccacctcagcctcccaacatgccaggattacaggcatgagccaccctgcccagctcaataacctaagttctatgaatgaaaaccatgactgcctgtggagtgagggggccgtcaggctggtggggagctgggtgaagacccagccagcccaggccagctcaggtgacctaatccccccagctcccacttccccctccccaagtggtttggccgcagaataagaacagtgctgggggtgctgaaagaggggacgcaaggctggggcaatgcagtgggacccgggggtgtcaggacaagcaagcagcccttaccatgtctgtgtagatctcgattgctcgcatcaaacagttaatggcctctggagagaaagggaggtgggaggagacatgagaaagtgaagtcgtttcagcagaagctgaggagaggaggcggacgcaggcgcacctggctgccagcagagagatcaataggcgctcagagctgccagcgctgccacacactctcaaggggctgggaagaaggggacggaatccctgagccccaggaaatctggtgagagggctgactctgcagactgtgacttgctgggcacatgcttctgggggagcccttctctcctcgggctgccaggatgctaccagcttcccacaaccccagggacagggcacagcagtgctaggccaggatgatggccagactcccacggtgttttaagacagacctgccaaggccctgctcttgaaggactgagctgctggcaaaggggaaggaggcatgggaggcggccaaaccagcatctgaggtggtcttggaggcaacagggtgccaggttctacctgggctctgccaccatctctgcaggatcctgagcagcttctgctcctgcaccaggaggacctggacctctggcacgaggaggctggatgtcatcaacactgagccctcagtgtgctctccactgccccctcttcctcgtagctcagcagtcgggagccctctgctcagtccctttaacctagtcctgccacccaccagctcctcaaaggttttgccaaaaaacctgaacacaccaggatggcactgaggaagaactgggctacctttgttgtactatctcttgcaagattttaaatttgggaaaggcttttttttgacaagttatttggaggagagagaaaagcatgagtgggaggcattttctagcagacagaaatgagctctcagggggtattttttaagaacaccattttagcacatctcaggaggacaggggtgttgtggggagggaggcctgggttggggagagggaaaggcagggagcttggacaggccacagggcatgggctctgagcttcagcctgggcatctgaaagttcctggtcaccgtgggggtctccatggtcacccaggccatgttcgcctgagaagagggtgctaccaagaagcgccggggctgggctcctctcaaggggctcacggtctggatgggactccaaactccctccgtggggaggcatctggacagaggctctttgtctcaggtctgtggctgggctttcagggagtccaacccctccttctgacatgtaaacagtggggtccataagcactcctctggggagtggggtctgtaggttttgtccaattcagaaagacctctggggatctaaaagggactgagagaaggtacagcactcagtccaggttctagggctgacagaccgagactgtggcagcagacagtggaaacggtggcaaaaagggggcagatgaggaggaaggggagagaacacaacctaaatccggcagtttgaagacacatacatcctgtaatcggcggacccagaagcaacggctaagccgggccacgctgcagaggagagcagcagctggagtgaggtgagaggcccgccttgccccgccccacctggctgcagtctccacatggaggccccgggctgctcactggttcactctcctggccggaacacccaggacaccaacctggcaccctgtgggctgaggcggcaaaggctgctgctccgcagtgagcagtgagatctgcagctgccacctgggcctgctggcactggctctggagcacccgccgtcagcatggcacagtccttgcagtagcagcagggagacagcttaccccccaggcagcaacatggactcacggggttaagtcccctccatgtctggaaagcggcgggccaccagcagacacctgggacagctggctcctggacgagcttctgacacactcatgactgctactcttatctcaggtcaccaggccttgtgcactcggacaggcagagcaacacccagttctgtggcctggcccctcctgtacccacccacagagggctggaaaggggctcagagcaatacagcccaagttggggagctatggcccaggccaccgcccatccccgcagtcactcctaccagcgacgcccaacctgacttctgcgtctctgaagcccttcctggttacacttggtcatctcctccttagtaaaatgggggcaaatcacagaatgcacaaagaaatcaaatgggttaaaagatgccaagcatctggtacacagtagaaacccagtaaatggcagctggggaggaagtgggggacaagcaggggccaggtcgcttctctgccccaggtacacacactgcccccacccccaactatcaggcaggcctgggaagaggcctcgctggcccgagtctgccctgagcagcagccatggttgggtaactgaggaaccaataacacatatgagcatcacccttccccacccagagccaccaaggtggcagcaggccaccctctgcgagagggagaggaattcgggagcccagtcgggcctcaggcacactccagctgccacttgggggcaggtccttctggagggagtcctggaggaagccctagaagtgctgacccaagacagaggccttctaggctgctgaggagaccagtgatgaggacggccccagggtaccggccacctgcttggggaagccaggcaaggttccaaatcgggcctccagcgctgtctcacaaggcacccggccaagggcagaggctgtggggagcccagggcaggcaggggcccctggactgatgaaagccaagggtgtcctgactggaagtttatcacacaccaggtgccgcgctgggcatgactgcatcatctcacagcagtctctgctttaacagacgaggaaacagaggcccaaaagactgacttgcccaggatcacaggggaggcagggtcctcccagaccacccaccacctgcgctgctgagccacacacagttgctacatgacattctctgtgaggcttttttttggggacaggatctcactatgttgtccagactggtcttgaactcctgggcttgagcgatcctcctgcctcagcctcccaaagcactgaaattacaggcatgagccactgcacctggccttgtgtgaggcctgactagcctcagacacaaagcagccactgcccttgatgccaatgtgccccttgccccactgggagtcatggctggcgtgcgtatctttaggctgtagctctggaagctgcactaacacccttccctgctcaacaccacgtccccagggctctggacacggcacctgctctcagctctacccaggtgaggctctcctttcagaactgccccctttcttccttgaaagatctcccatagccaaattcacgcccccagcctcagctctgtgcaagttggcctctgtgccctggatgtaacatcatctttatactttcctaccggtcggagtcctcagccaccttctgagcttcctaaggccagggaggggccacatccagactccaggcccacaccctgcagagtctcgctggagagctagaaaagctcagatcaaacgcaggggagggaccccaccatatcccactgccaggcagggcctgtctgcaggaagtgaggggtctgctgaaagagcaaatggcactctctgttcggcagcctggcgctcagtgttgccccagagtgtccttccagtcactccagatggggcagcagctgaacgtcacagatgctaagacagcacctctaggccaaccagtttcccagggagcagaaggaaaggcttggcggggcagtttaatggaaggcatggagactccatgtggtgaatcaagcttaaaaccaacccagggtctccctgggtcatcactgcatcaaccacgcagcctgctgtggcccagtgctaccagccaggcaagccccatggcccacccagttacaaggctgctcctcggcctcttgccaggcctgagccccaccatgtgaccactgaggccaacgcatgagatgcccagctgctgaggagcaactggtcagtctaaggacagagaagagctactggtcaacacaaattcatcctcatctgggaactaacacgtcagatcacgacaaaggggtatgccagcagttctcaaacacgccatgtgaaccagtgctcactgatccatggaggaagctccctgcactgctgcaaacctgtcttctcttgggaaggacaggcttttattccaagattatatagctgctttttattttttaaagattcatatattttccattcccctgagatgacagtgacaatagatggtcatttttaaaaactgcctgtgctttctaattagcaacctgtacctggcaccaacattttaaaaaataaattaaaattcccgccacatgcaagcaaacactgggctggacctcctcttcgggaggcacccagggggacaaaactgttttctcaccatgagtcagccccaaactgggtttctgtccctagcacgctctcattttaagtaatttgttctctggcaactacatctcgggctctgttctctctaattcctccccaggatgtagggaagccaggttgggctaatttccgctcctttttcggcagcaactcctacctggctggtctcagaatcctccccgccccccacaccgctcccttctgcatgttaattctgacaacagaacagattttcctctctccccggcaggcggtgggtctgcaatggaactcccactcccaaatgctccgggattgggaaggggtgatcagctgcaccgacaccaccgacacggtagataggggggcggagacttgagcagggcgcgaatgccaactggaaggaagagagccagttctaaagtcaacgctcactctgcctcaggcacgcccctgccagcctatcacatgtcggccactggaaaaaccagagccgccaggaaacctgaggaatcaatgcagggtgctaggatggcgctccggacagccagcccgtgtggcccgcagaggccctcaccttgggggtcggctttcttgaatgcgttgccagcgtccacaaagcaggtggctgcgtcgtgcttgctctggagctgcaggtgcagctgtgcagcctggcagaacgcgtttccagcagctggaacagaagagaagggcagtcctggcctcagtggggctccacactttatgaagccacagagacactgccctgggaggtgggtcgggctctcgagaatgcggaaagagtccccaagacaggacgagggtgacctgagcgagcccagaccgaggcctagaactcaggtctcctggctcctgcgctcaggtctgctggctcctgcgctgaggctcctggtggcccacctgacagtctctgagggcggcaggaagctgcctcgggggaaggccctgagccccaggtatatggaaagagagccagggtaagcccaggtaaaacaccatgtccctaatcccagctatgccagcatttccagggccaccacttctaaagatccaaggagaaggcagatagagctgagttggaaaggatataaaacagagtgaggtggcctcctgcacctcccggcctgggcagtcctccccaggggagcctcgaagcacagggcccagaaccaccactagaaggcaaagtacaggctgaaatcatggggtggcttcggaggggtattttgggaagcaaggggcaactgagattaaaccacataacatcttcccatctactcccctttccaagtcctgtttctttttccacagctccccaaagctcttcctgattctcccaactcctctgcctctgttcacattctgttcccttcactgcagatccccatggacaaggcacttgcatgaattgtgaggctcatggagttggggtcggacaacacagagccggctccctccaggagctgcatgtccagagagggaaacaggatgtggacagcaagaatgaatacatgcagaccagtgcccatgggcggagggcagaagagaccgtgcctgaagcctcatccatcctgtgctcatctgcacacggtcagcttctgtgggtcccaagccattctgcccacacatctcctaactgacgtttgggaggcagcagcatctctcctcctcctcgtgcagctgaccacctccagctcagctctgaggcttctccccttcattctcctccagctgaatctgagtcagagtttctaagctggaagaggaccaggaggcctggccctatcctcttaagttttgagcagcagaaaagacaaagccttccgggttttcactatatgatttcattattttcaagagttccaaatttgagtataaaattacggccaggcgcggtggctcatgcctgtaatcccagcactttgggaggccgaggtgggcggatcacgagatcaggagatggagaccatcctggacaacatggtaaaactctgtctctactaaaaatacaaaaataagctgggcgtagtggcacgtgcctgtaatcccagctagtcaagaggctgaggcaggagaatcacttgaaccagggaggcggaggttgcagtgagccaagatcgcgccactgcactccagcctggcaacagagcaagactgtctcaaaaaaaaaaaaaaaaaaaaaaaaaaaaaaatttcaagaaaaggggatattaccggggggaaatggcctagggcttttctttgaagagtttgggggcagaggtaacaaattttaggggaaaagcaacacctatgtaattaaaaaataagctttttttctctagaggaattttctaagtttgggagcataaaaatacaaaaaacatttggctttattcacaacgtattttgtgaaaactcaggaataactctttgaattttggggaaaccaacaacattctcaaaaacgatgataatcaattttattgtgcacctctgcaccctgcctccatggtcccaccaccaggttccctctcctccacagtcagaagttcctccctgcattcaaacactgggtctcttgccgtatttccttaattcaatcttggtgacatgaaagatgtatgatgaaatgagcctcgaaagggctcaacacactggcttgttggacttcttgggcctgcagggagctccaaacagatctccagcctccctgagcccaaggggctcctccccacccctctcctctgtgaagctatcctgcctcactggggcaggttaaacactcaggctctgcagtcagagccttggtttctgaatcttggttctgtcacttactagttctggcatcctgggcaagagactaagccaagcctcagtttccaaatctgtaaaatagggatatttatagactgacccttagggctgctgtgctaacgcaattaaatgatgagcacttaggactcaacaaacagcagccatgattcacgttgttattggaatcacctgaacatcctcccccagcctagaatttagacactgatggaagcactaaggaagttaccaggaaacctgaagttctgaatttaaggaggactctaagagctcatcaatccacatgggtttatctaggtctaataatctatttattcccatcctctctgtcctttcaccaaggccccatgacccagagtataaagtaacccagcaggcacaaaacaagagagcaggccagtggctttccgatgccggagagggcatacaaagagaaagggccctcaaggccaacctctcgggcaggcctgtgtgagtggaagctgagggaggaggagagcaccttggaggagctctagcggagatgacataccactccagtttttggccattttgaacatgtttgctgctctggcgtagatttcgcatgcttcctctattttggatgagcctctggggaaaaaggaaagaaaaaaaggagacaatctagtcggctatccaggagaaagcaagcattctgctccagtgccgggcacagacgtgcccctacccctcacccttcacctgtgaagccagcttcccccaggcctcttgagtctgtggcccccgcccctgcatacaatggcacactcacttcgggcagaccagctccctccgggagtactggggtagatactgggtgcttgctggggtagtggggcgaagagttcctgaccccaccacaaccccagggtctgacagcctcttctacttcctgcctgggatactaggggcccactgggtcccaggcgcgctacaaatcccctttccccgggagactgcaaagcattctgggggactagcccagtttaagacatcgtgttgctttcgcagaggcagccttaatcctgtgccttgcactctgtggttgctcaataaagaccttgcagccctggagtgtgtcattaccagctcaggactgggcatatatatcacacagccatacaaagaaatgggaagcactattttaaagtgtagatataagatgttcccatttgtgtttaaaaaaaaaagagggtgggctgggtgtggtggttcatggctcctgtaatcccaacactttgggaggccaaggttggcggattgcttgagctcaagagttcgagaccagcctgggccacacggcaaaaccccaactctacaaaaaatacaaaaaattagcagggtgtgatggtgcacgcctgtagtcctagctactagagaggctgatgtgggaggatcacttgagcctgggaggcagaggttgcagtaagccaagatcacaccattgaactccagcctggacgacgacagagccagaccttgtctcaaaaaaaaaaaaaaaaaaaaaaagagaaagagagtgaaaataatagaaacatacatgtttatataaacataggatatttctgggcaaatacacaaaaacctagtaacagcatttttctcttaaggtgaagcctgcagaaggagggccaggtgtgggaggcagacttattcactggacatcccgtatttgtactgtctgaatttttttttaactgtttgtacatcttttcgagaaaaaaaatatatacatatatacacacacgtgtacatatatacacatgtgtatatatgtgtatgtgtatatatgtgtgtatatatctatacatttacacatacacagacacacacacacacatatttttaagtattaggatttatatttggccctgtggtccagcaatgaattacatctctagcaatttatcctaaaaaaactaatcagaaaagttacaaggatgttcagcatagcattatttaaaacagcaaaaccccccaaaaacttattgtccaacagtagggatacactgggagatagacaggaatttgaaaacataaagggtaccctgtttgggcagcttcactctggcttcttgacctccacatgtacataatgagcctcctcttgacttgggggacctcattagtacctcaaacccgtaagtcccactgcattcttctgcccttaataatacaaccaggcttagcccgcgaggtctgtagtctctgtaactgctcaaactcccaatatctacataatcagtagaataaaatccacacactctggagtcccaccaaatggatttcagggcctctcttcactggcataactagtgtttagtttatttttaaggaagagaaaagggaggagtgggtactttcccattcaaatcatcctcaccatcccatcccacaccctgtgtcaactggcccaacattatacctgggaacttgtccacaccaaccccagctgtggaggggctcaaaggtaattttgggagctgggatgtgagcattccttccctctgcactgcggattcagtgtgtccaacctgcccatccctttcagccacatgaagtgctcatttcatcaaaccagagtcccacagccacacactttgggattcgctcagtagggtctggatggggcctgcaaatgagatttttaacaattggggtttggggggcccaggtaattcagctgatcaggtgagtttgagaaggaaaaattgactgagaccgactacctggaaagcagccaccagcgatcagatcagcggccaggcctggcaatgtcagcaggcaaataaatgcccccacggtgggcgggctggttgggccagggatcctggcctcctgaatccacatcacaccaggtaaataatctatttattcctatcctctctgtcatcttgccagatgaaaagcctaccctctgccttctggggctgtgctgatgctgtcccccaccctctgctgtccctgggaagtggccctgagcaatgtgttcttcccgcactcgccctgctgcactctgtcttccctcacccacctcacctcagccagcccaacacaccttgggccttgtttggagtgacttcttttttttttttttttttttgagatggagtttcgctcttgtcgcccaggctggagtacagtggcacgatctcagcttactgcaacctccaactcccgggttcaagcaattctcctgcctcagcctcctgagtagctgggattacagatgtgtgccatcacaccctactaatttttgtattattagtagagacagggtttcaccacgttggccaggctggtctcgaactcctgacctcaagtggtccactcgcctcggcctcccaaagtgctgggattacaggcatgagccaccgtgcccagcctggaatgacttctttagaacccattcctggccttggagaggtaagaaactttcaaaaccttctggctgagaatcctgaagggtcctttggggcctggctgcaaaaaaccctcagaaggaccttctctggaatgttctcttaaagggacattttcagaccttaatcacaggtctgcccaccccacaggtcccccagctcagccttcccttctttttgagtgtgactaagtcctatccagctccatgcactctctgaaaaagcacagaccctggatgggcagaaatgacccacgtcactgagtggcccacagcgggcaatcaacaatgagcagagtcagcccagccgggtttatttcaggacggacacaaagcctaccagctgcccgggctgaaactctgtgatcccaggctaagcacagccaaccctgcacggggtcaatgattctgtggggtggaaaggccagagggattaacacctgctcaggccccaggcttgcctccttcttcccctgcaccccgcggtcttgcccattaccatggccaggggatgacaggagatctccagggtcccatcctcttcttttagaaatgggagtgaagtccccaaagggggaaagtgacgtgcctaggttccagtggaagatcctgaagaagccattcacatacacatttattcacctggggaacaggtatccgagcatttattacgtgccaggagataacaacagtacacgaaaggaaaatctagctgggcctcctctcctgagggcctgggtggcagcgcatgtgacagctgactgtccctcccccactgacctcccccaagctgcctctgcttcactcctcccatcccacggctctgagccactccgggaatagagggaactggtttgggctgcctgatgcagggctgtctataattacccgctcagctttgctctctccccctccaaggcggaggaaggagtctcaggtctcccaaacacagccaccaacctcagggactgccatatggaaggctgggcactgccaggaatacacagatgcctgatgggacctgggccagggggttgtgcagggcagagtcttagccccctccttccttcctccatccaccaggcacttcctggctgccagaaatacaccatgccctgagacccaccacctgcagctcccgaaggacctcacgaggcagggtggacaaagtcaggcccccatttcgggtcctggactcactctatctctcttgcctctgtggaagccacagccacaggcctacggtttcctcctcagacttaaggcccactgccccaagtctccagtcagcaccctcagtggggaaggtgtcctagggcccgtcacatgcctgtgtcttccctgtaagcccacctcctgcacggctctcgagaccatgtgccttaatcacggctggcgcatggcgttccctgcctcccaggcactcccctggaaggagcccacagctcctcacgagagccctttgggtgctgcccttgctttacaggcgaggaagctggggctcagagagggcggagggcttgtccaagcttaccctgccaggaagcagcagggcttggaaagaggactggggccctggggatccagtcctgcccttgcctctcactcagtgatcaggaaggcttccttccccatgcccaaggctccttgggaaaataaggagggaggacaaggtccctgcctgcccccacccctcctctagattaaagaagccagggagcctgtactgcctaggcttccctcatctcacgagcagaggctgctctctgctggggctgcgtggagcatcctctaggcaaaggagtatgaattaagccagccccctaccgagcctgccagtaacaagccaacaggcagaaggaacgtcagaaaaagttaaggctgcctgtggtgcagggtccaccctggcacagggagccgggggccaccagccctgctagtccactgactgcactggagctgggagctgccagaggctcagcatcctgaaggcaccgccaccagtatcacctggaagcgggaaaccaccagctgcctcccgccactctgcagtgggccttgcctgaccaagcagagtatgagttcctgcagggcggggcctgagcccagctctgctttcccatctctccacaagccccagttaacaacggtgaaagaataaagtgtcacaggctaactgcccagctctgaaatcgccacaggaccctcttgtgacatgcctgtctgggcaaagacaaggggtagaaagagaatgactttggggtggcgagacctgggctgaagtccgtttcaggtactttgctaagtgttcgacctggggctagttatccctgaggctttttttttttaaataagagatggggtctccctgtgttgcctacactggtctcgaactcctgggctcaagcaatcctcctgcctctgctcccaaagtgctgagattccattctttatctacaaaatggcagcatgtctggccacagtggctcacacctacaatcccagggctttgggaggccgaagcaggagggttgcttgatctcgagtttgagaccagcctgggcaacacagtgagaccccaactctactaaaaattagccaggcatggtggcatatgcctacagtcccagctacttgggaagctgaggtgagaggatcacttgagcccaggaggttgagactgcaatgagctatgatcgcgccactgccctccagcctgggcaacagaacaagaccctgtctctcaaaaaatgaaaaatgaaataaaatggagacaatgaatctggcctgggaggagtctttgtgaggattagaaatgacacatagtcaatacttggcacagagcgcagaatggaaaaggtgctcaatggttgctattacacaaaggaagagaaatacgctcaaaggggtgcctgccacccaggaatgggaattctagagagtttcttgtggtggtaaaaataaaataaaataaaataaaataaaataaaataaaataaaataaaataaaataaaataaataaaataaaataaaataaaataaatgctgacagtagtcagacaggcctggcctcagcgccagctcatcgtgtgccagcctgcgtttccttatgtgtaactaggcataagactccacaccttgcagggctgctgaagcacgagcaatcttgcaggcagcaccccacggcgtgcccagcagagagctggccacaccacgggcgttcagtaaacgagagcatccctctcatcaggccccgcagaggaccgattccaggcacgcttccctacttcagaatagcagcatgggcttcatctccatcccagattagctaagtaatgctcctccttcggcttccagagtcctggcctcccatgccccaccccttactgcacaatgctcaaaatacatacaggcccacggcccttcgagatgagctcagagccaggatctcacctgccacacggcacacagcctggcaggcgccctgtttcttattttcttatacggatgccctcctgcaccccaacgggattacatttcaccacagaccaagggcgaatgtacttcctttttcttaaaaggtgttctcaaagacccttgcctctcagtagccccatcccaaaaaggagacggaaatgtttgtatggccaggcagcaaagtcctatccatcaggaaagccaggaactctcggattccccagaaaccttgtgtgccctcaggaaagactccactctgagactgggcaagagatgccaagttttcagttgtggatcttggcagctggcagggcactgtgattcaccagggtgcccactggaaatggcgccggggtttctgcacgctctgcagaggaaggcggtctggagagaaatctggaagctcgtgcccacaccagtctcagccaaggccctgggcaggccctgtacagacaagctggccctcccagggtcccgccgttattgcctacaggtagttcaaacaggaactgatttgtcaagatctgatcttaggaatgcactgtttgtatacagaacaccctctgccacctatttctccagcacttctagctcaacttccaatgacaatacctactaataaagatgacagtgagcccttaataaacattagcagagccaggcaacgtgctcccaccacttcccacacatcgtctcatttatccttaaaaccacctgaggaaacagttaccatgattttcatttcacagatgaagaaactccctctacacgtttgtatccaagaggaaggaagtttttattttggctattttggggacaggggaggtggctgggaaacatcagggatgaggaaaagccccagggaacagagccgccattcagaacctgcaggatccccaaacggcacagcaggcactctggattccccaggagacacgcagcagggaggaggaactagtgtgcctggactcagccatccccttctgctgctggctcactgtgctgtagttaggaagtctccgtctttttgcttccagagcagaagtttgagctgcgcccccatcaccaaggggaggaacaggtatggctttgagcttctcctaactggctggtgctgtcgccttcagtggctgctggtgcatcaaagccccctagcgtctggcagcccagaaataatgaagagcaagggtggcatctgagcaccaaggcaggcgacagcacagacacccatcgccttgcgtcccaggtgcgggctctctgacttgccctttgacaggggcagaggcccctcaatgtgggatgctgtcattgctggggttcccaaaggggaagggagaggcaccaaggacaagctgagccgcaacgctcccttctccagtcccggcagctaccaaggaccttgaataaaggtgggttatgaaatgttgaacacaagcaaacccagatcagagaggaggaggtgcctgagtgattcccgcccgccaagcaggtcctcccaagctggcctctggctgtgctcccagctcccaggcacacaagctccggtcaggccagcctcccatcctccctgccctctgccctaacctcactcatactcccacagcaccaggtcagctcctctgggagctggaaggaactgagatgaacacaccagctctttttttcacatatttggagaaaacagccatgggaggacagttaagagggtggcagctctccaacacacctagtttgccaacatccttcctaaatgtagtgcccagagatggtcatgaaccttgaggagaaactaccgtggtagcacagcaaaggggctaagtgagaaggctctggaatcacacagaactgggtttgaatgccacttctcccacttactgtggggctgggcaaataagtcaacttctctaagcccccaagtttctctacctccacggggattttgtaaggactaaatccataccatccatcagcaggttgagcctggcccaggccagggtctgagtcagagcgagcacttaataaccagcatctgctagtattaccggcactgcaacagcctcctgctgtcactctcccccacaccagctgctgcagtcctttctagaaggcaaacaggagctcgccaggatgggcctcccttagcctcctcggagatcttcagtgcctcctccaggcccagcccttgctcaccagaccttccttgtctggcctcacctgccgcttccacctttatggtctaacgtggaactccctgtgttccatcttcctaaggcatgctccataataatccttgcctggagtgctgctccctgccagagagcaccccagaactcatgttcatccccccagggttggggcctctcccccaggaagccatttctgatccctctggatctcagttccctgtctttccaggcagaacctcccgtcacggtagatctctgttgcaccatccctgctgcctagagcaccctccccggccccactccccagcaagtcctgggattccttggggcccagctcactcctcaccaagagcctccccctggttcacgctgcttcctctgagctcagacagtcacaggaatgacatcatcgagcccctccttacagtaggtaattccactttattggtgtttgctgttcatcctgccttcccaatcaggtagcaaatgccttggggctgacttagctgctccctccaagcacacagtccaacagcccactaatccctgggccaaagggaccagacacccagagccacccaggaaaactatcaccaaaaacccagctcgtggccccacccccaaacacagcacttgaacttctccccttgtgaagaaaaagaaacacacacacaccctctctctcctcgcagcctctaaaataaaacatttttcacctaatcaatccagtccatcagccccggatgtttctccacaccaggcaattcgccatcatgttcttcaagttattttgctaaacattatccaacctcaaacaaggggcgtggcctagagcccttttcctgttccttcctctcttgtaaagatccctctccttcgtgtcttaccagcctctgccaggctcctaccacagtctcttcccatccccaggccctcctcccaaacccccttctccagccttctgcagatgttcccagtcccaccaccgtccccaggctctgcttctgagtggccaccacacactgttctctctacaagcccactagtcctttcccaggtctcctctcagtttccacaacctccccttgaccctttcgggtcgtcccatcagcacagatcccaccacctcccacaccaccgccccctgccaaactcccttctccttcctctgcccagagcctcatgctcctctcaaccctactaagtcttcgtggatcccttttctgttccctttcagctcctcttagcacactcatgtttctcagtctctccctctcctgacccctcccagacctctccgctcgggcgtccaccttgaacccccatcagctctctgcacgctccgaacctgtttccttctggaagtcacattaacaacagctaacactctcagagatgtaactccacgccaggctcaattctaacactcatagcaaatgggaggtaggtttgatttgtgatctcctttagcagggagactaaacaatttacccaaagtcatgaagtaagtggcagagctacttgggctcttggcacttctaagccactacaatttatcacaggatggtcgtgtcagcttttaggagctaacgtgagttttatgccacgtcatatgtgttagttctgtctcccaggccttttcccatccctcttctcagcatgtctctgtcatccctattactcgaggatcacacagcaggaatttgatcccccgttttggttctctcagtccccctgtctctccctgttatccctccatctccttggccaagccaccaccacgcattcccccacccaggagtctccagcctcaacccaggcctcctcaggcttttttctttctttctttctttttttttttttttttttttgagacagagtctcgctctgtcccccaggctgtagtgcagtggctcgatctcggctcactgcaacctctacctccgggttcaagtgattctcctgccccagcctcccgagtagctgggattacaggtacccgccaccaggcccagataacttttgtatttttagtagagacggggtttcaccatgttgtccaggctggtctcgaactccccgcctcagataatctgcccacctcggcctcccaaagtgctgagacctccacagtcttgactccatcatcccgggttcctccgttcagctgtccttaaactagtcactgctaaccagggccgtactcaccccatgcaccccccacacttcagacgcggctcaccgctcctaggatcatctagccctgagcccctctgcctggtgtcagcccccttcagccttcaccctcaccgcccagggcccacgcaaatccactgctccaggggttgaaaaggtcagtccctcgggcaggcgtcctcagccccaggccccatcactgccgcctgagagccttcaaacagactcccctagagctccgaaaagcctctggacctggcttctctcccggactccctccgtccccccaggccggtcccctccaaggcttcaggacgtactccctcggtccaggttctcccccgcccgctggcctgtcttcggcctgggtccccttcctcgcctcaagatagtgtcgcctcggtccgtgtgtcctcagcccaaatcccttccgccatgtcagaccgtctctcctcaaaccgtgttgccccggcccaggctcttggccctcagcctgcgtcccctctgccgcctcaggccatgtcaccttattgcaggttcctctccgtcccctcggcccgagctctgcgtgccctaacccgccacctccgagcgtgactccttcgtcctctcagcctaggtcccggccgacccctcagcccggttctcacccaaagaggccagagaagaaggactgcgagttcttcactttgcgctccgcctcggccaacagcgccatcgcctccgcttccttcccggaattgtccatggcggccacaaagggactcagcaaagcgcctgaccctgaccctgggaagactcagccgcggccgggccgcggaacacagatcggtaaaactcgcccggctgcgttgacgtcgcaccggcgcgcgtcgcttgcggccaggaaccacgtgactagcgctggccaaccagcggcctcgtaacgccgcgcccgctccgccggacacgcccccaccagccgccgcacgccgcccgtgactcgtgaccccccaatcggcgtcaagagacctcaacgcatgcgcacataccggcgaacggcgctccactctctccccagcgctctgtacctcacctcccacgtgaccctgtggaaggcaatggcagtaccccccgccgaggccccgccccacggtgttgctgctggatcctcctccaccaatcagcaggagccctcggctcgcgctggggcggggggtcccccactcgccctccccgcggaactctggcacagtcagctgaccgcagacactcacgtgacagctcggggcccacgcccgggtttgacagttctgcgcagaacttagtcccgcccccgcggctggtctcgccggtttcttcacttggaaaggcgtttgtgggaaaaggaaaccgttctgctttttcttgctccctctgtcggccagtactagaactgctttggggagaccggtgaagagagactgcaaacaaaaacttaagaggttctctaactctggtttcataaaaaatagctgaagagggccgggcacggtggcttacgcctgtaatcccagcactttgggaggccgaggcgggcggatcacttgaggtcatgagtttgagaccagcccggccaacatggcgaaaccccgctctactaaaatacaaatattaaccgggtgtggtggcacactcctgtaatcccagctactgaggaggctgagagaggagaatcgcttgaaccggggaggtggaggttgcaacgggccgagatcgtgccactgcactccagcctgggcgacagagtgagacttagtctcagaaaaaaaaaaaaaatagctgaagagagcgtgttaaaaaaaaattcagattcgaagatgggcgcggtgtctcgtgcctataatcccagctactcgggaggcgagaggatcgcttgggcccaggagtttgagtctagttcaagtcccgccttgggcaacatagcaagactctgtctctaaaaaaaaaagtttaggctcaaacacacctcctgctgtcccagaaaattgagttgctggtttctgagacagggtctcactctttgggttgttggttttggagacagggtctcggtctgtcgcccaggctggagtgcagcagcacaatcatagctcacctcagtataactttgtagtgccagaaaggaaggaagtattccacacgtgtgctcacacacaaaattagggggtatgccaaaggagccaactgaaagaactcccaatggccaaagctggaacaatttgagcatcaaaataaagtagtattggattataatcccaaacataaagtatccatgagcctatggtcatatagatgaatatagaacaaataaataaaggggggagaatagacaaatagtttgtgcagaagaattccaaataatctgcgtagatactctgctctcaagaaggtgaaggatacctccccattctgtaagtatggactgtgcatagtgacttcctttcaaagaagagggtacaagaaaggggagaaaaagcctaaatttacagtggagaaacctgacattgacatctaggtgattgaggttaacctcaacattgataagtcatgtgattaaaatggctctttacttctgggatctttcaatctaatcatgaaaaaaacactagacaaattccagttgagccacatcctccaaaatacttgcccagtactcctcaacactgttggtgggtgcagtgtgtcacatctgtagtcctggtactttgggaggccaaggcaggaggatcacttgaggccaggagtttgagaccagcctgtccaacatggggaaaccccgtcgctactgaaaatacaaaaaacttagcccggtgaggtggtgcatgcctgtaatcacagctacttgggaggctgaggcaggaggatcacttgtaccctggaggtggaggttgcagtgagcggagattgcctcactgcactccagcctgggggacaagagggagactccgtctcaaacaaataacactgtcaagtcatcaaaacaaggaaagcctgagaaaccatcacagccaaggagacgtgactgctaaatgtaatgtcttaccttcggtgggatcctggaacagaagggcattgagttaaaaaaccaaggaaattggccgggtgcggtggctcatacctgtaatcccaccactttgagaggctgaggcgggtggatcacctgaggtcaggagttccagaccagcctggctaacatggagaaacactgtctctactaaaaatacaaacattagctgggcctggtggagggcgcctatagtcccagctactcaggaagctgaagcagaattgcttgaacccaggaggtggaggttgtggtgagccgagattgtgccactgtgctacagcctgggtgacagagtgagactccatctcaaaacaaacaaaaacactaaggaaatctaaataaactatgaagtttagttaataatattgtgccatactggttcatacgtggtaataaatgtaccattctaatataagatgttaatcataggggaaactggggtatgtgggaatttttttttgctgtcattgcagtttttctacaaatctaaaactatcctaaaaatcttctttaaataaaacagtttccaaggccgtacccacaatggttccaattctgagtctgtggtgggtcacaggaatctgcatttttaaaaaacagaaccctatataattaggatgcagccagacctggtggttcatgcctgtaatcccaacactctgggagaccaaggcgggaggaccgcttgagcctaggagttaaggaccaacctaggcaaaaagcaagatcctatctccacaaaattaaaaaaattttaattactccttgggaggctgaggtgggaggattgtttgaccccaggagtttgaggctgcagtgagctatgactgtgccactgcactccaaccgggacaacagagtgagaccctgtctcatctcaaaaaaaaaaaaaagtaaaattaggatgcagataatcccgggaccacagtttgagaaaccgctattatctagggggttggctgagccgagcaaggcataagaagccttcccccaactctcttcatacatgaatagacttgcctggaccacctacttgtggttgccactgtgtcctgaccacagagcaggtgggggtgagcctggattaccacaagcggttttggttccatgtctgtcaaagcaacactatgtaaaagcttctgtttaagctgttccatttcagggtaatttgtcatgcagcaacagataatataacccctcagccttttcaaccagggaatttttttccatttccagagttcattggatttatttaggatgggatccaaacaatattagcaatcacatgagagcttgttaactagtagccattcagttcttatggtgcaccctcccaagtgcttaatttacattttatttctatttatttatttattttgacatggagtcttgctctgttgcccaggctggagtgcagtggcacgatctctgctcactgcaacctctgcctctggattcaagcaattcttgtgccttagccacccaagtagctgggattacagtcatgtaccaccacacctggctaattttgtattttatatttttagtagagatggggtttcaccatgttggccaggctggtctcgagctcctgacctcaagtgatccgcccaccttggacttccaaagtgctggcattacaggcgtaagccaccacgcctggccataatttacattttatttaactgataggttgcgggggttgaggaggggcaattttcatcccattttacagattgagaaaactgaggctcccacagggaaagtgattcgccctagtttacaaggaggtaagaggagccaggatggaattgaggttcatctcacacctgaaccctttcccttaactgcagtgttccaactgcttcaaactcagcgtccacctctgccccactcccagccaatctttaagccttagctgataggtgggccctctgtgaaaccttctcacgctgccgtctactttcccagctcttcagaacacggctcaccctatcatagacacgatcacaccctgatgcaatcaatcctctgcagtcaattccccatctgagctaatggcatcaactacagctgctcaggctcaaacctgccctgctggccttgatctgtcctttccttgaccacctcccactgatgtgtgagccactgacaactctgtcgcccaggctggagtgcagtggcgcgatcttggcccactgcaacctccacctcccaggttcaagtgattctcctgcctcagcctcctgagtaactgggactacaggtgttcaccatcatgcctggctaatttttttgcatttttagtagagacggagtttcaccatgttggccaggctggtctcaaactcctgacctcaaatgatccacctaccttgacctcccaaagtgctgggattacaggtgtgagccactgcggagcctacctttcttttctttctttctttctgatggagtcttcctctaccaggccgaaatgcagtgacgcaatctcggttcactgcaatctccacctcccaggttcaagcgattttcctacctcagcctcccaagtcactgggattatagtcatgtggcaccacacccagctaatttttgtatttttaggagaaatggggtttcaccatgttggccacaatggtcttgatctcttgacctcatgatccgcccgccttggcctcccaaagtgctgggattagtggagagagccactgcacctggccatggagctgcatcttgagtggtctaggctaactgtggtcatttcccttctcactaacagggatcagtttagaagcgaacacaggctcaatgagacatacgggcatctgctgggagctgttaaaagttttcctcactcttaaaaagggaggcagggaggggggctgttttctcttctttcccccgccgcccgccccctgccggtctggattttggttcgaggttattctcgcctctgctggagccctcgttctgcccctgcccctgcccctgccaggggtccctgatttcaaggctgagcccctactgggacagccaaactccatgattgtttaaatcaacaccaactcttctgttacagtcaaaagcatttccagtaccatgacctaaaatcaccttgtttgcttattactgctaccttcctgctcctacaagagaaggtccgtgaggaaaagggcctctcttgcttcactatccctgttgtacggattggcaacgtccagtgcattctacagcaggtgcttcgtagatgtttgctgaatgaatgtccaaatcaacatgcccgtgttctccccaaggcccccagcccccagggcaggccacagctgactcacctcctgcccttagcacgtggtggggttcctaagcctttattggatcaataggcagggaagtcaaagacagcagctcaagaacccaatttaatcagatttacgagttgacatgtacaaaaaacaccgaacaatgcagaattcatcgcaagactagggactgaatctggaaggtagagtccccgccccagggaggggcccagcgtgttggagatctcaaggttttttcccactgattctctaagtcttggccttatctaacacatgaaaccaaaccccacaactgaggctaagatttaagagctacccagagctaaattttcccctccccaagcctccctgctctagaagtggaagggaaagaaggggagagactatgaacctaaggagagtggagcctccagcaccaccggacagggactgcatagctgtccgacaactgagctcctcctgcctatctgtggccaaatgccctccatgtttgcaggcaggttggccaacaggggacagggagggtggggggaggcagaggggtgccccaaacgccctggagaggccgaagggaggaggggcagcactggaggccccattcggacttgctgccacgggagtcaccactgcagggggccgatgtcagctcccagctcctcttcctttagctggaagggcttcactggccacttcaccctgatgatgggctccacgtggtcctgaaggcggtgccgcttcatatgggcatttcgactcttgatcttgtcaaacaccctgaggagtcaccagaggacatggggtcagagcagggaggaagggatcacaggggctgaggctgggagccctgggagtgtttccaggagaaagctgggtacctttcacactctctgcatggaaaaatgccctggctctctgcacttcccaacagctcgggggtccgcttggagcctgcatttgggctggagctgaggatggactccctcctataactcttggtctttaacttgggagttggatggtggctgggtctctcccgagggctgcatgggacctgcagagggagcaaaagtgacataagggtgctgacctgtcctgctgtaagagagacacagagctgggggcatacgtgtctcctgcaggaaaacccttccatcaggagcacccccgccctctgaccccaccgtccaactcaacgggtagcaggcactgggaggagagaagagctcccgacacagccctggttcctctaccttttcctctgtcctttccacttcctccggctctctcttgaccctcttttctagccctggggctcggccacagtcaaacttgatcatttttttccagatgtaataatactcaacgcactgagctaccgtctttgtctggatctagtgaaagaaaacaagcaggctgtggctgtgccacgcgggccctgggagtgtgaccttgccattgggccggccgcctcctttggaaagccctccggaagcacctcttcctttggcttggcgttaccactcaccacaaaggcacaggaccacaaaatccttcctggggacgagggcgttcaaactggagccacatagtagccaccagtacctaagcctgcacactctgagcagccattccagctcaggaattctttcctaaggaagatgggcacaaaggttgcaccagggatgccaactgtgacatcatgctaataaatcggaatgctctctgcaggcagaataccacacagacattacaacagctaggcagagcctctaaagtcttggcaggaagtgacccactctagaagaaggggaggttttgagtgcacagtgtgaacctaggggattattttcccgttcctccactaagaaaggatcccactaaaaataacttctgttaaaaacaaaagggaagctgggcttggtggctcacgcctgtaatcccagcactttgagaggctgaggcaggaggacgacttgaggtcaggagttcaagaccagcctgggcaacatagcaagaccccatctctacagaatttttaaaaaattagccagtcatggtggtgcatgcctgtggtcccagctacttaagatgctgaggcgagatgatcgcttgagcccaggtgttcaaggctgcagtgagccttttttttttttttttttttgagacagaatctcgctctgtcgcccaggctggagtgcaatggcacgatcttggctcactgcaacctccgcctcccgggtccaagtgattctcctgcctcagcctcctgagtagctgggattataggtaccctccatcatgcccacctaatttttgtatctttgtagagacagggtttcaccatgttggccaggctggtcttgaactcctgacctcaggtgatctgcctgccccgacctcccaaagtgctgggattacaggcctgaaccaccgcacccggccagcagtgagctatgatagtgtcacggtactccagagcgagtatcttttttttttttcactgcaacctccacctcccaggttcaagcaattcctctgcctcagcctcccgagtagctgggactataggcgcgcaccaccatgcccagctatttttttgtgtttttagtagagacggggtttcaccttattggccaggctggtctcgaactcctgaccttgtgatctacctgcctcagcctcctaaagtgctggcattacaggcgtgagccaccgcgcccggcgagcgtctcttttaaaaaaaaaaaaaaaaaaaaaaaggaaaagtttaattgctctaggaagaaaatttcttgggaaattaaatcggctattgagcgaactccagaaaagacattctccacccaaatgtttttcagctttgtgagtattcacaaacgaggagtcaaaacagcacaaactctgcctaagagacatcactaagtttaaaaaaaagttggacttctgcttctgaacaagatggagcaacagaaccagatttaccctctcgtccaaaacaatgaaaacacagagtcaaaatataaacaatgtttggcaagacaccaggcgtcattcaacaaagggcagtgaaccctgacaggaagcaagctgccaccgctccagcttatcaacttgtgtttccaggccaccacccaggcaggggcaatttaggcagaacccagcaggacttagggagctgaggtggagcacagtgcctccggagaccacggcggtagagcccacaggacagaggatgggagaggagagagctacacacagaacattccagagatggggagcaaatttcccccaagaactcacccaaagactgcccagcacatgcatgggaagagaccagccaaagctgggcaaagagccatccaaaaggatgagaggggaaagtgtgtgctgctcctacagggccaggaagagtgcccgttcccacagccagagtgggaaattttatgatgcagggggcactgggtagggcagtgacacagtcttgcctcagtaaggagaaataatcagccttagagaagagctatgctggtcccatctaaaaaatctaaaactgaacctaaaagtaactgtgtcccagaacaaaactcaagaatatttacaaggctgcaaaaatatccagcatccaacagctaacattcacaatgcccgtgatctggtgaaaatcaccatgcacgcaaagacgcaggataacacggcacatcaggaggagaaaacccaatgtatcaaagtcaacccaccagagacacaggtgttagaatgagcagggaaggacatgaaaggttaccataactgtttaatatatgttcaaagagttatgccagaggccaggcgcggtggctcacttgaaatcccagcactttgggaggccgaggcaggaggatcacctgaggtcaggagtttgagaccaccctggccaacatggggaaaccccatctctactaaaaatacaaaaaatttagccgggtgtggtggcacgcacctgtaatcccagctactcaggaggctgaggcagcagaatcgcttgaacccaggaggtggaggttacagtgagctgagatcgtaccactgcactccagactgggtgacatagcgagactctgtctaaaaaaaaaaaaaaaaaaagagttataccagagctaggtgtgattgcacacacctgtagtcccagctactcaaagttggaggatcacttgagcccaggaggtcaaagggtgcagtgaactatgatcacacccctgtactccagcttgggcgacagagtgagatcctagatcttaaaagaaataagaaccagtaaaaccttcaaaacactgctaagagaaattaaagatgatgcatagagacacagcccctgttcatgagtcagaaactgaatgttgttagaatgtcaactctccttggctgggtgcggtggctcacgcctgtaatcccagcactttgggaggctgaggcaggtagatcacctgaggtcaggagttcaagatcagcctggccaacatggtgaaaccctgtctctactaaaaatacaaaaattagccaggtgtggttgtgcgcacctgtaatcccagctactcgggaggctgaggtacgagaatcgcttgaacccgggaggtggacgttgcagtgagtgaagagcgcgccactgcactccagcctgggcaacgagagtgaaactctgtctccaaaaaaaaaaaaaagtcaactctcctcaattggcctatagagccaatgcagtaccaatcaaaatcctagcaggttttttgttttgttttgttttgttttttttggtaaaaatggataagctacttagaaagttcatatggtaatacatgatcttaagacttagaaagctacagtagtaaaaacagtatggtattacatttttttgtcttttcaacaaaaggtacaaatgaatatccacatgcaaaaaatgaactttaactcatactttacaccatatacaaaaattaacacaaactgaattgtaaacctaattgtaaaacctaaaactataaaacttctagagaaggccgggcaaggtggctcacgcctgtaatcccagcactttgggaggccgaggcgggcagatcacgaggtcaggagatagagaccatcctggttaacacggtgaaaccccgtctctactaaaaatacaaaaaattaggcgggcatggtggtggcatgtgcctgtagtcgcagctactcgggaggctgaggcaggagaatggcatgaacctggaaggcgtagcttgcagtgagccaagatctcgccactgcactccagtctgggcgacagagcgagactccgtctcacaaaaaaaaaaaaaaaaaaaaaaaacttctagagaaaacaaggggaaaatctttgtggttgggttaggcaaagaattcttagatacaacaccaaaagcacagtccataaaagaaaaattaataaatgacttcatcaaaatgacaaaatttttctttaaaagacattgttaagagattaaaaagctacagattgggagaaaacattcacaaagcatggatctggataaatgacgtgtcctgaatcaataaagaactgctgtaactcaataataaaaacacagccggctgggcgcggtggctcacgcctgtaatcccagcactttgggaggccaaggtgggcagatcacctgaggttgggagttcgagaccagcctggtcaacatagcaaaaccccgtccctactaaaaatacaaaaattagccaggcgtggtagcaggcgcctgtaatcccagctactcaggaagctaaggcaggagcatcgcttgaacctgggaggcagaggttgcagtgagcatggattgcgccactgcattccagcctgggcaacagagtgagactccatctcaaaaaaaaaaaaaaaaaaagaaaacacagacatctcaataaaaacatatgcaagagatatgaacagacacctcaccaaataaggcatacagacagcaaacaggcccatgaaaagatgctcagcatcgtcagttgtgaaggaaacacaatgcgatgccaccacactgtcatgagaatggctggaattaaaaggactggccctacccagggctagcgagtttgtggagcaactagaaatctcttttcctgccggtaggaatgtgaaatgatacaactactttggaaaattgtttggcggtttcttaaaaagttaagcatacacctactaagtcattccattcctggtatttactcctctagaaaacaaagtacatgtccataccaagactggtacctgaatgttcataacgaatttatttatagtcatcccaaactggaaaccactcaaatgtccaccaacaggcaaatgattctttaaaccgtggtacatccacccagtggaatactattcagcagtgaaaaggggagacctatcaatacctggaacatggatgaactcaaaatcatgatgctgagtgtgagaaagctggaccaagtagagtccatactgtgtgactactccatttatagcaaactctaggaaatgaaaacgaatttacagtgccctggcagatcagtgctgactgaggacagggggtgcaatggggagtgattactatgtggcaggaggagattcagggctgagggacatgctcattatcttgactgtggtgatggtttcccaggtatagtatcaatatgtcaaaacttagcaaatcttattatactgcaattatgtgcaattttgtatacatccaattttttttttagaacagaaaataagcagcaggacattatatgcagtgagatctcatcctttggcttttttcggggtggtgagagtctcatcttgtcacccaggctggagtgcagtggtgcaatcttggctcattgcagccttcacctcctatgctcaagcaatcctcccacctcagcctcccgagtagctgggaccacaagcacgcggcaccatgctaggctagtttttaacttttttgtagagacaaggtctcactatattgcccaggctggtcttgaactcctagcctcaagcaatcctcccaccttggcctcccaaagtgctaggattacaggcgtgagccactgcgcctgacctcatcctttttttctttttttgagacggagtttcactcttgttgtccaggctggagtgcagtggcgagatcttggctcaccgcaacctccgcttcccgggttcaagcgattctcctgtctcagcctcccgagtagctgggattacaggcatgtgccaccatgcccagctaattttgtatttttagtagagacagggtttctccatgttggtcaggctggtctcgaactcccaacctcaggtgatccacatgcctcggcctcccaaagtgctgggattacaggcataaaccaccacgccaggccctttttttttttttttttttgagacagagtcctgggccgggcgccgtggctcacgcctgtaatcccagcactttgggaggctgaggcaggtggatcacctgaggtcgggggttcgagactagcctgaccaacatggagaaaccccatctctactaaaaaatacaaaattagctgggcatggtggcgcatgcctgtaatcccagctactcggaaggctgaggcaggagaatcgcttgaacccgggaggcggaggttgcggtgagccaagattgcgccactgcactccaccctgagcaacaagagcaaaactccgtctcaaaaaaaaaaaaaaaaaaaagagacagagtcctactctgttgcccagcctggagtgcagtggcacaatccccactcactgcaactctgcctcccgggttcaaacgattctcatgcctcagcctcctaactagttgggattacaggcactcaccaccatgcccggctaatttttgtatttttagtagagacagggtttcaccatgttggccaggctggtcttgaactcctgatctcaagtgatcctcccgcctttggcctcccaaagtgttgggattacaggcgtaagccaccatggccggcccttatcttttttaaagtacatgcatacctatatatataaaatttgtacagacagaaatgcctgttgcttggtggaataggtaacagaggttgccaagcagaagtaggactgcggggaggggcatggaagactgttctgtgcaggtgatgcaggtctgtaccatctggagctgttcatgaggatagctttttgacattgtaaactgtctacagtaagagtgctgccacaggcaggtgagggtggggccctccgacccccgaccagccctgcagctctagcttgtctcagctgtgtgaggcagggccttggacaccagcccacattcactttaccatcttgtgtatcaagtagaagtccttcttgtgggcatagaacgccttcttaaaaagcctcttctctataggggtccagacgtctgaacctatcaaagaacacagccaacagggggaaggccatttgtcctgggaccacagccatggctgaaatgcagaccaccttcccatttatagctgccattactgagtaccaattatgtgccaatctcataaaaaactcaaaaagtctccagaagggagggaccactactagccccacttaacagatgtggcaactgaggcttcagtcgcttgctaaaggcaggtgggggccctggcatcctgtttccagagctgatgggttcaaccactgaacctaagcccatcttccctccccctggccatgatcattccccttccagctgggcagagtccgtaaggaaaccactgggaaagggcgaagcaggatcccactagcagaatgtggcgcccactgagtcatcccgacaaggacaggccctcctgaaaggcaggcaaaggtcccgaggagaactccaggaggcaggggcagagcttgcaacagagctggccgattcataggggtctcagctgggccaaaccagctcagcagcctttccccgtcacctgtgtagcgatagtcagcgagcaggtgtgtccgtggcttgtggggccctcggagcagaagagtctccagggcgacctggaacaagaggagcgacaggctgcccaggaccaggtgggggaagaggaccacaggcatcctcccattcatctgaaaaacacttgcggctgtccctgaagacactgcctgtcccagggctattcaaagttgccctggatgggccaccagcctgtgaactgtctgtgcgtgcatcaaccgtgtcaccaggcacaccactgaatgcagctgaagttattttttcacagcaagcctatcctgacgaaggagactgtgtgtggatttattctggcacaagctccttactccctcagggactggcattttgaggagtatgacccttgcgtagggccccatttttattttcttcatagcactagtcaatagctaacaattgaaaacattttatttttaaagatgaggtctcactatgttgtccaggctgagctccaatttctgggctccttcagcctctgcctcccaagtagccaggaatacaggtgggtaccactgtacccagctagctaacaattttctttgttttttcttttttttgagacagagtcttgctctgtcacccaggctggagtgcagtggcatgatcttggctcactgcagcctccacctccccagttcaagtgattctcctgcctcagcctcccaactagctgggactacaggtatctgccaccactccctgctaattttttttttttttttttttgtatttttagtagagacgggattttaccatgttagccaggctggtctcgaactcacgacctcaggtgatccacccccgccttggcctcccaaagtgctgggattacaggcgtgagccatgcgcctggcctagctaacaatttgactttcctaaaatgtaagccccctgagggcagggattttatctcaatcacaagtgtaagccatcattgcagggtttgcataatttgtggggcccactgcaaaatgaagatgcaggactccttgtttaaaaagtattaagaatttcttttctttttttttcttttttgagacggagtctcactctgttgcccaggctggagtgcagtggtgcgatctcggctcactgcaactgcactccacctcccaggttcaagcaattctcctgcctcagcttcccaagtagctgggattacaggcgcccaccaccatgcctggctaatttttttatttttagtagagatggggttttaccatgttgtccaggctggtctcgaactcctgagctcaggtgatccacccgtctcggcctcccaaagtgctgggattacaggcgtgagccaccgcgcctggccaagaatttcaagacagagacagcagagcattaaaccaagcgtggagcccctcagctggccctggccccagtgcctacagtacaggcaaccagcaggtacccaataaatatgtactgccactctgctgaggacctgctatatgccagacactgcctctcaggttggtgaaaagcaagaccatggcatgactcttagatccttaacacaggcaatgtggctcttcctctcccgctcctcacagttagacttttaatatactttctaacacccagaattgtgagcgggggggggggggggggtccttggagtaggtagaggcatttatgttgcatcagaggtttgtatatataagttttcaattgaaagctaaaactcaaggaattaagtagatgaatgcagggcctgagctgggtctttggggcttcccttctccagtgccccctgagatctcagaggaacccctgcgcttgattgttgccccagacaagtagctatgaattgggcccacgtcttagcattcccctacagtccgtgcacaaggaccactgcaatcccaaagccgctgtggaggaggatgggcggccttcttccagcttccatccgctctgaacccccaagcagacagcacgtcacatgcacctagaaccctgggccccaggaaagcagggagggtccccttgctgttcctcacctgaacgttgccctgagcctcgtgcaggcagtgcagagcgagctccaggttggtgccccctcctggcatcacgctggagcatgccacattgcagagctcggtcactgtttccaagaaggacatgaggaagaggaggcacacaggagtcatcaggtgctagggaggaacctttcccgaaagacagcagagagggggtgccttccccttctctctcctgcatctcagggagggacaaggaggaagagcagaaccctgtccccagcacccactcctgatggcctgaccagccaccatgtgacaaaagaggtaggggagggagagtgcagcagggaagaagcaacgctggccaagagccagctccctcccacgcccaggggacactacttggatctagcggtcaggagttccagacctaggaggaaaaacaccctggaaatggagggggaagaagggcccttaggaatttagccccaaagcctcagccacctctatcctgtgtctctgagctgatcatcatatctccccatggcttccagaccagagaagctacatgctcgtcagttccagccagggatctctcctggagttccgggatctctgcctgaaaccggcttcctatattgatatgtctgaaatgaggccacacacagataagggagacgtacaaacatgactgagatgggaagtgaaatggagacgctctgtatgccctgctcttgggccacagcctgctccatggaaaccctctgctgtctcaggtgcatcaggtacgtgctgttcccgacagatgcacacagacatttcagaaacttctgcagggacacttcctcccttcctctgttttccttcattgccacatttctctctcagggtcaaggcaggggaggtacaagctgacacccggcatgtgtctacgtccacaccacagccatccagccacatccctcaggcatgcttgagtcccactctgtgccatcaccaattctacctggaaccccaaggtccagggcattctgtccccatgtgccacatatatatttctagaaggaataatttggggggattttcatatatatatatatatttgtagaaggaataatattgggggatcttcctacatatatttggaaaaatctaccgcttcacgcctagggagcctatgtgagtaaacctgaaccccaccatgggaagaaggaacccttgggaaaagtgacactagaactcaaggtggggtaaaagcagcttcactggaaaggacccaacttacggctcaatgctgattttggtgtcatccttcaccacacagatgccaaaggacccatccacttgatctagaaagcacagagtgaaaaggctcaagaagacagacagcaggtaaccgacagggtcctctgcctgcctgtgtggacgcagctgaaagcagggtctttaagatcccatgggttggccgggcacagtggttcacgcctgtaatcccagcactttgggaggctgaggtgggaggatcacgaggtcaggagatcaagaccatcctggctaacacacagtgaaaccctgttcctacttaaaatacaaaaaaaagtagccgggcgtggtagtgggtgcctgtagtcccagctgagacagaagaatggcgtgaacccaggaggcggagcttgcggtgagccgagatcgcgccactgcactccagcctgggcgacagagcgagactccatctcaaaaaaaaaaaaaaaaaaaaaaaaaaaaaaaaaaaaatcccatgggaaagggcagcacttcagaaaaggtagaggaaggaactctaacaaattaactcatgacaagtatacgtatatataaaaacagcacactaaagtctctggaaattgtcctaaggtcattcagcacttggagaaatattcattaaaaaaaatcaactaggccgggtggggtggctcacgcctgtaatcccagcactttgggacactgaggtgggcggatcacttgaggtcaggagttcaagaccagcctggccaacatggcaaaaccccatctctactgaaaatacaaaaattggctgggcgtggtggaatgtgcctgtaatcccagctacttgggaggctgaggcaggaatcacttgaacctgggaggcagagtgagccgagactgtgccactgtgctccagcctgggcaacagagtgagattccatctcaaaaaaataaaaaataaaaaataatcaactgaatattggtaagaacaagaggctgttgcatctgagctgtgacctgctcccttacccagccagctcccagctccaagggttctattccaggtaggtgcagcccagacaggggctgcctctcctgtcagctcccatgcttaaagaattaaaggaaggtataatgacaatttctcatcatagacagaatatcattaagaggtagaaattattaaaaagagagaaccaaatgggaattctggggttagaaagtaaaatattggcaagtgaagctgttgaggaaaataataaaataaccaaaatggggctcaataggtttgagttgacaggaagaaaataatctgtaaacttgaagacagatcagtagagactatggaatccgaagaacaaagagaaaaataaagagagcctcagagaaatgtgggataccattaagtacagcagctacatgtaacaggagtaccagatggaaaggagaaagagacagaaagaaatatctaaagaaaaaggcctgatgcagtggctcacgcctgtaatcccagcactttgggaggccgaggcgggcggatcacctgaagtcaggagttcaagaccagcctggctaacataacaaaaccccgtctctactaaaaatacaaaaattagcctggtgtggtggtgtacccctgtaatcccagctactcgggaggctgaagtgggaggctaacttgggagttagaggctgcagtgagccgagatcatgccactgcactccagctggggtgacacagcaagactctgtctcaaaaaaaaacccctccaaaccacccccccaaaacaaaaaaacaaaagttaaaagctacagtaatcaaaacagtgtgatactggcataaggataagtatacagatcaatagaattgaacacccagaaatacacccacacgtttatggtcaattgatttctaacaatgaattgtgctgagtcaattcaatgggaagtcttcaaaaaatgctgctggaagaactgcatatacacatgcaaaaaaatgaatttggacctttacctcatgtaatatataaaagttatcttcaaattgattacagacctaacctaagagtcaaaattacaaagctcttttttttttttttctgttgcccaggctggagtgcagtggtgccatcctggctcactgcaacctccgcctcctgggttcaagcgattctctgtctcagcctcctgagtagctgggattacagtgcctgccaccacacccggctaattcttttgtatttttagtagagacgggatttcaccatgttggccaggctggtcttgagctcctgacctcgtgatccgcctgcctcggcttcccaaagtgctggcattacaggcgtgagccaccgcacctggaccaaaattacaaaactcttacagggaaacaagagtgactctgcatgacttgggtcaggcaaatcttcacatataacaccacaagaacaagtaacaaaagaaaggaaattgggcttcatgaaaattagaaatgtttgtcctgcaaaaggaccactttacacctactaggatggttatacttaaaaagatagacaataacaagtgttgacaagaaggaggagaaatgaaaatgttcatatactgctactggaaatttaaagtggcccagccattttggaaaacaatccggcagtttgtaaacagttaaatatggagttaccatatgacccagcactacactcctagttatctacccaagagagctgagaacataaatccacacaaaaacctgtacataaggctgggtgtggtggctcaggcctctaatcccagcactttggaaggccaatgcaggaggactgtttcaccccagagttgtttttttttttttgagaccaaatttagctctttcgcccaggctaaagtgaaatggcatggtctcggcttactgcaacctccgctgccgagaccagctcggtcggggagaccctaacccagcggcgctagaggaattaaagacacacacagaaatatagaggagtggagtgggaaatcaggggtctcacagctttcagagctaagagccctgaacagagatttacccacatatttattgacagcaagccagtgataagcattgtttctatagattatagatcaattaaaagtattccttacaggaaacaaagggatgggccaaaatatagggatatgtctggctagttatctgcagcaggtgcatgtccttaaggcacagatcgctcatgctattgtttgtggtttaagaacgcctttaagcagttttctgccctgggtcggccaggtgttccttgccctcattccggtaaatccacaaccttccagcgtgggtgtcatggccattatgaacatgtcacagtgctgcagagattttgtttatggccagttttggggccagtttatggccagattttggggggcctgttcccaacactgcaccctcagttcaagcgattctcctgcctcagcctcctgagtggccaggattataggcacccgccaccatgctcgtctaatttttatatttttagtagagacgaggttttgccatgttggccagcctggtcttgaactcctgaccttaggtgatccacccgccccagcctcccaaagtgctaggattacaggcatgagccaccatgcctggcccacctcagagtttgagaccagtctgggcaacatggcaagacccccctccctacataaaaacaattacaaaaaattagccaggcatgggggtgcatgcctgtaggcccagctactctgggccgaagcagaaggatcagttgagcccaggaggttgaagctgcagtgagctgtgatcatacaactgcactccagcctgggtgacaagagtgagaccttgtctcccaaaaaaaccccaaaaatttctatatgaatgtttatggcagcattattcataatagcccaaagtggaaacaacccaaatgtccatcaactgataaataaacaaaatggggcccatctgtacaagggaaaaatgttcggccataaaaaggaattgagcactgatatgcactacaatatgaagggactctgaaaacatgccaagtgaaataaactagacacaaaaggctgcatattgtatgattctacttacatgaaatgtcctgaataggcaaatccaaagagagaaggcagatgagtgggtgcccaggctgggggaagaagggactgtggggatatgggcggagtcactgctaatgagctctggcttcttctggggatgctaagcgtgctctaaaattaagactatgtgatagttgcacggccttgtgaatatcctaaaaatcactgcatactctaaatgggtgatttgcatggtatgtgaagtacagctcaataaatctgttaggaaaattacataggccaggccaggcacagtggctcacacctgtaatcccagcactttgggaggctgaggagggtggatcactggaagtcaggagctcgagaccagcctggccaacatggtgaaatcccatctctactaaaaatacaaaaattagccaggcatgatggcgcacgcctgtagtcccagctacttgggaggctgaggcaggagaactgcttgaacttgggagttggaggtttcagtcagccaagatcacgccactgcactctggcctgggtgatagagtgatactctgtctcaaaaaaaaaaaaaaaaaaaaggaaatgacacagactggacagggtggctcacacatttaatgccagtactttgggaggtcaaggcagcaaaatcacaagtccaggagctcgagaccagcctggacaacatagcaagaccccatctctaagaaaaataaaaaattagccaggtgtggtgatgcgcacctgtagtcccaactatttgggagtctgaggctggaggatctcttgagaccaggagatcgaggctgcagtgagctgtgatcaagccactgcactccagcctgggtgacagagcaagaccctgcctcaaaaaagaaaaagaaaatgacacagaagggcaggcagaagcatggtcaggctaaatggcctctacgttttctttcgggctgtaaaattctatgcactagaaggcacttagatcagtcctggggcacatctgaatagcaaaggaaccctcagactaggtacacccaggcaggagacaatcactgaacccaatgctacaaggtagagtggctgtggtccgcaggcaatccaccctgggatcacagagtgagtgccccagcctcactcaccgagcatggagctgatgagctggtcagggctggcctgagtggacgtggaacagagggtgttgaagtacaccccagagccctcccggatggggctgagcattgggggtggtgtgtagggggagcactggaataagcccttcaggaggcagtccaccaggaacatgggtgaccgcaggcggctctggtggcatcctgcagggccaggctccccagccgtggagggtgggggccgcttcttccgctttctctgctggctgctctccttgctgtctcgctcctccccgtctttctcttgtccctgaagaagtttagaaccacaggtggtcgcctgaagccacctactgcaccactccatctccaggatggaaagagagcaggaaaaggagaccggccagagacaggaaactaggaaatgcacgcccggcaaaggaggctggccacacctgagccagacctgacgtactgagcctggcgatgatccggctgcagccttctcctgcacccactgccccagcagagcccctgactctgtgtaagaatagcctcaatcattaagatgactggcccttaaaaagagagagatccccagagatacagtgtgacggtgaagaaagaaatgctgctccacccaaatgacaagcaccgaaatgacccagccactgactcaggggaccttcaggtccacggactgtgtccccgagtccagcaggagcttcttcagtagggggtcctccagtacaggctgcagagacaagccctacgagactgatcactcgtaactcaccatgctctctctcacttccacaaaatctcctctccgctctgccagccctactcctcctcatcctctaggtctcagatcccatacctcctcctccaggaagccctcccttacctcctcaggctgggtcaggagccccctgggaactctctgggctccctctgctcccagctctgcccactctgggttgtcactgtctggggacaggcctgtctcctccactggactaggagccctgggaggcagggcccaggctattgtggtcacctctgtgtccccagcaccacccagcacagggcctggcacagaggggctcagtgaatgctgaatgactgaattaacatgcaaaccaggttcttctggatcaagattttcttttttttttttttttttttgagacagagtctcactctgttacccaggctagagtgcagtgttgtgatctcagctcactgcaacctctccttcctgggttcaagtgattctcgggcctcagcctcccgagtagctgggtttacaggtgcctgccaccatgcccagctaatttttttgtatttttagtagacacagggtttcaccatgttgcccaggctggtctcgaatacctgagctcaggcaatccacccgcctcagcctcccaaagtgctgggattacaggcatgagccaccacatccagcctggagtcaaagattttctgtggtatctggtttgggtttttcctacggcttcccccagcagctgcgggcagtggcaggaaggaggcaggccgacaagcacccaccatggccatgctccctatgtgtcgggtcactggaaccacggggatcgattgggggaccaccaaaggggctgcagctgtggggtccaagggcttcttggttcctgggggactatgcctgtccccttctggcctcagcacctgtcttagcggcttgcaaaactctgtgccaaacacctaaacacagaagagaagagatggctctttaagagataaggtaggtggggaaaggaagagctgcttcagcaaaaaaagctgtcatagaaaacagcagtgagtctgtggcatggaccaagctggagagctgctgcagcccatggcaatggcctgcccctggagagccacacagcctgactccagcccccgacccagagtgacgtccccatcctgagataagtgacaccaatctcgtttactccccacaggcctgccagaaacccagtaaccaccaagccactggtcgtcccccttcacctgcggttcctgcttccctcgaggtgacggccactggtcgctgtgaaaacacatgtggctgctcagccctttctccgtataaaacatctggctgcagttcttgcagacaaaagtgctcctgggcttcgtccagtctgtgggactgccgttttgctggttactgtgggacatggcaggaaagaagagtgggagattaggactctgtccttgatcactgattttttgttgtttttttttcttttttgtctataactccaatccactgacttttttttttttttggagatggagtctcactctgttgcccagactggagtgcggtggcaccatctcggctcactgtaacctccacctcctgggttcaagtgattttcgtgcctcagcctcccaagtagctaagattacaggtgtgtgccaatatacgtggctaatttttatatttctagtagagacagagtttcaccatgttggccaggctggtctcgaattcctgacctcaaatgatccccctgcctcagcctcctgaagtgctgggattacaggcgtgagccaccgcgtccagcctgactactcttgataaaccctataaaatggaggctgtaccctaatcccattaggactgaaagcatcctccccactcacttgtccagggccggcacaggaaggccagaggactcctgccagggtgcatgcaggatcgggggcttcttaacttaccctctgcctgccacattctcttccttcaccggatgggggagcctgtagatgtttccaccctgaagatgaaaatgcatctgaaccaacacatccaaaatgaagaggcaagaagagctcaaattacagacttttagaagaaaacatcagagtaaatcttcatgaccttggattagacagtggtttcttagataagacaccaaagcaaaacagacaaattagacttcatcaaaatgtaaaacttttagccaggcgtggtggctcatgcctgtgatcccaggactttgggaggccgaggtgggaggattgcttcagcccaggagtttgagaccagcctgggcaacatggcaaaaccccatctctacaaaaaatacaaaaattggcctggcatactggcatgggcctgaggtcccagcgactcaggaggctgaggtgggagaatcacttgagccaggagttcaaggttgcagtgagccatgatcgtacaacttcactccagcctgagtgacagtgagaccctgtctcaaaaaaaaataaaaaataaaaaataaaaacttttgtcctgcaaatggtatcataaataaagtgaaaagacagaccacaaaatgaaagaatatttgcaagtcatgtgtcagataagggtcttgcatccagaatatatagagaactcaaaaaatagtaatctgattttaaaaaataagcaaaggacctgaacagacatttcttctagaaagatacacagatggccaataagaacacagaaaggtgttcaacgtcagcagccacggggaaatacaaatcaaaaccacaatgagatactgcttcacacccgccagggtagttataatttaaacaaaccacggacaataacaagtgttagtgaggacatggagaatgtggagccctcatacactgtgggtgggaagaggaaacaagcaaaacagcctagtagttcctcagacctaaaacagaactgctgtacgacctggcgattctactcctagaacataaatccccataaaaatttgtacatgggtgaatattcacagcagcaccatattcaaaatagccaaaaagtggaaacaacccaaatgtccatccactgatgaacagacaaataaaacgcggccttatccatccaacagaggatcactcagtcatggaaaggaatgcagctctgccgtttgccaccccacggatgagcctggaaaacgtcatgctgagtgaaggaagccagatacgaatgccacagagtgcatgattccactcatatgcaatgtccagaacagacacatccacagagacagaaaggagactcgtggctgccaggccctggggggagggcgagattgtgggtgacaactaagaaatgtggggttccttttggggagatgaaactgttctggcaaagagtggggatggttgcacgatcttgtgaatatactacaaattacccaacgctacactttaaaatggtgtattcaggccaggcaccatgactcatgcctgtaatctcagcactttgggaggccgaggcaagcacatcacctgaggtcaggaaagaccagcctggccaacacagtgacaccctggctctactaaaaatacaaaaattagctgggcatggtgatgtgtgcctgtaatcccagctacttggaaggcccaggcaggagaattgcttgaacttgggaggcagaggctgcagtaagccaagattgcaccactatactccagcctgggcaacagagtgagagactccgtctcaaaaataaatttggccaggcacagtggctcacacctgcaatctcagcactttgggaggctgaggcgggtggatcacgaggtcaggagttcaagaccagcctggccaagatggtgaaacctcgtctctactaaacacacaaaaattagccagatgtggtggcgcatgcctgtaatcccagctactcggaggctgaggcagagaactgcttgaacccaggaggcggaggttgcaatgagctgagatagcaccactgcattccagcctgggcgacagagtgagactccatcataaataaataaataaaataaatttaaaaaataaaataaagtggtggatttggctgggcatggtggctcatgcctgtaatcccaacactttaggaggccgagatgagaggattgcttgagcccaggggttcaagaccaggctgggcaacatagcgagaccccctccatctctaaaaaatatataaaaaataaaatggtgcattatttggcacctgaataataaagatgttaacaaaacaaaaatgaggtagctgtggtatgatgggaagctactcatcctcctgagtagctgggaccacaggcgtgcaccaccatgcccaactaattttttttaaattttggtagagacagggtttcgccatgttgcccaggttggacatggagtcaggagacctggatgagctctttggaccaggccctccaaacacaacatctggaggaaccagtgaataattatcaatgtgcttaagtgtggggcacgatgcaggtgcccacttgtgcttgtggaaaccaagactcacaatcagaaaacacatggccatttcaagcaggaatctttaaaggaaagagagcatctaccttcatatcctctgaagattctaaaaaggcaaatccaaagggaaacaagagaaaaaaaaaagcaaaaaaggctttgtgagataacagtgttttgaacaactctgggatatcctcatgttgatctttttttttttttttaagacagggtcttgctctgttgcccaggctggagtgcagagacacaatctcagctcactgaaacctccatcttccaggttcaagcgattctcccccacctcagcctctcgagtagctgggaccacaggcgtgtgccaccacgcccagctacttttttaaaattttggtagagactgggtttcgccatgttgcctaggctgatctcgaactcctgagctcaagcagtctccccacttcagcctcccatcccaaagggctgggattacaggcataagccacctcacctggcctcattctggtctttttttttttagtggggaaaaccacaatctttcggaaccttaattccttcctctgtaaaattgcatctggggactctctgaaatgaaataaaatgcctggacaactaacaaatgcaaaggaaactcactccactctggtcaggccacgtgagagagagctggtacctggattctgctgaatattgtcagcttggacttggagggatctgccgggggcccggccgatgagaaggaggccatggctacctggctcggagaagccgcacagcacatatccatcttcgccttctctttccggaagccggagaatcgcggggccctggggttgcccaagagccggtagcctccaccccgggagcaggctgggcccttttcaccttttgtgatccttgaagccgcgccattctcggctggggcctgcttccctggcagcgaggctcctggtggctcctccccacctaactgggtctgccgttggcctgtggaggggaagatgtcctccaggtccaaggtccctttagaggatcgcagctgcttggccagagaagagatgtctggattcctggaagggtccagagacggtgctgcaaggggcgttggaaccgcggccactttcagtcccccctttgcgtctcgtctcgtgctgccgggggaggcctctctgggaaccccgggtgtggtttttctcctgcgggctggggagccctctgcctcggggtttccagggccggcgtggagagagtccacagcaggagccagtggtgggggctgctgcggccacggcccctgcagcggcctcagggcggctggtttgccctcgggcgcagggagctgggaggagactgctgccacctgggcatgggagaagatccgctgggacttggtgatcatctggaacacctgcatctgctcgtggctcacaagaggttcctgcgacttgaggaagagctggcggaagagcggcgaggcatccgcagggagcccgcctgccttctgggcctcctggaggccgggctccccggggttctggcacaggaaggagtcgcagtcgaccttgaccttcttgggggcgcaggggtcatcttccccgctggccgacctggggtcgctcggggcctccgcggggaccctgaggagcgcggcagggaagggcagagcatcctccaggccaccgccggggccgggcggggactcctccgaggggcttccgctgctgggtcccgggccagactcggagccctcccgcgagggcacggccgagggcttgtggacaacaaacacgttgttgcctttgcttttgggacagcccggcaggttccggagccactggaagctgtggctcgatggctgggaactggcagggaccgtctggcctcggaagagaggcaggcaggcaggcacggagccgccttcgggccagcactccgcggtggaccgggcctggagcagcgcggtatctggctccggctctggcgggtcgggggcgccgttctcggcggccctggaattaggggctgtgaacacgtcagtggccggctctttctgtgggaggcaaggctcctcgggaagctcggtgtccagcgctgctggggccgcgtgggggccggctggggtgcaggacgaggaccccgatgaggcggggcagggacaggcagtgttcctcccttcgctgtctgaagcccccgccggggctgggccaggagaaggggtcttctggtggacgatgctactcacgatgcggcgcaggaggtcccggtggggcaggagggagccgggggacctggcctctgggggcaccagggaccgcaggctgctggggggcggctggccggccgactcgtgggcgtggggggagtccccgcaggcctcttcctccgggggggcttccttcaggatgcacaggccgtgatggacctcgtagtgccggcgcagagagcggtagtcgcagtagctcttgctgcagccctgctcgatgcacacgaagggctttgtcttctggtgggtgagcatgtgcccggtcctggagccagacacaagcaggggcgtcaccggggcacctgggaccgggctttctgctgtaggaccctggtggcccccaaaagtctgtggtacagttgcaccacaattcagaaattgtactcagcccccacgaggaaagaccacccagcaaaccctgcttcggtcaaagccatctggcaggggagttcctctcccctcacctttaagcaaaccccttacagaaaagtaaaaaaaaaaaaaaaaaccagcggggcacagtggctcatgcctgtaatcccagcactttgggaggccgaggtgagtggatcacttgaggtcaggagtttgagaccagcctggccaacatggtaaaacccgtctctactaaaaatacaaaaaatttagctgggtgtagtggcacatgccagtaatcccagctactggggaagctgaggcaagagaatcacttgtacccaggagatgaagtgcattgcagtgagccgagatcacaccactgcactccagcctgggtgacagagtgagactctatctcaataaacaaacaaacaaataaataaaattttaaaaaatacaaaaaaaaaaatccactgaggccagatcagatttccccagagtgggttcccaaggaacacaaagacctccagagttgctcctcaaggactttggcacagctaataaataagttttgaaaaaacaccattcactccttggaggttcacgatgcacagtagcaaatttaattaattaattttttgtttttgagacggagtcttgctctgtcacccaggctggagtgcaatggcacgatctcggctcactgcaactctgccccccaggttcaagcgattcttgtgcctcagcctccaagtagctgggactacaggtgcgtgccaccacgcccagctaatttttgtatttttagtagagacggggttttgccttgttggccaagctggtctcgaactcctgaccctcaagtgatctgcctgccttggcctcccaaagtgctgagattacaggcgtgagccactgtagccggcacacagtagcaaatgtaaaagccacacagagagagacctgtttaactttcagtgtctctcaaacttatttgcccagagaactgtttttggttttgttttcaaaaagcccctattagcattcctgagaaccagaattctgcagaatagactggaggagatgctaacttggggacgatccttcctttaacaaaggaatctgtgccttaccgtaggagacccctaagaagatgctacctggaaccccccacagcaaagaagccaatttacagaggcccaatccatagaaacattatagagccaaacagccaaatgtgcctatagtttctgcaaacagaaatgcatgtaaatatgtattgcatcacacctacctctgcattaacacattataaatataagcagaggagtacatcaccctctgggcccccaacagccctgctctggacagtcctagtcgatgtggactaaatcataaagtctttccccaaaggctcaccctcagcctctgtctgagggaagcaacagagagggaatcaggagacctaagttctacccccagctattaccaacttgtgacatgagcaaattggctccttttcctggggtaggtgtgggtgagaggataagatgaaagatggattagtcaaagccccttgtgaaagggaggagccccataagaatgctaagtactttcatctcccacttgcaggtctcctggtttgaaaaacatgtgtctttctttcccccacaggcaagacaagcttatcatttccaagacattaagcggtggctcacacctgtaatcccagcactttggggaggccgagtcacgcagatcacttgagaaatcctgtctctactaaaaatacaaaaattagccaggcatgatagtgcatgcctgtagtcctagctactcaagatgaggaggcaggaaaatcacttgaacccaggaggcagaggcttgcagtgagctgagatcacacctctgcactccagcctgagtgacagagcaagactgtccaaaaaaaaaaaaaaaggaaattttgctcctgacactttttaagtcaaaagttaaaaggaaaagaatgagttttttaaaaaagaaaaaaaaacaaaaaaaaaaatagaaaagaaaaacaaagctggggccgggtgcggtggctcacgcttgtaatcccagcactttgggaggctgaggcaggtggatcacaaggtcaggagtttgagaccagcctggccaatatggtgaaaccccatctctactaaaaatacaaaaattagctgggcggggtggcatgcgcctgtagtcccagctgctctggaggctgaggcaggagaatcgcttgaacctgggaggtgaaggttgtagtgagccgagatcgtgccactgcactccagcctgggtgacagagcaagactccatctcaaaaaaaaaaaaaaaaaaagaaaaaaaaagaaaaacaagggttaattctccattgccatgttctagaagcaggcgtctcatctttcctgtctcgtgctatcccaaaacacagagaacacagatccgttttcctcagacacctaccagagactcaggacatagctctataaagttagcccaactcctcccatgacacaattgactcagaagccagctgttaggcgtttttaacccacaagcagcccatctgcaaacagaagcaggggcttcctcacaggcgtgaatttaggggctgggacagcagcgcccactctcttccctgcgctctgatggtgtgagaagaacggagtgggctgggcacggtggctcacacctgtaatcccagaactttgggaggccaaggcgggaggatcacttgaggtcaggagttcaagatcagcctggccaacatggtgaaaccctgtctctactaaaaataatacaaaaattagctgggtgtggtggcgggcgcttgtaatcctagctactcaggaggctgaggcaggagaatcacttgaacccgggaggcggaggttgcagtgagccgagatcatgccactacactccagcccggatgacagacaaaaaaaaaaaaaaagcatggagtggctgtggctgcggctgagcagaggtaatacacgtctggaaaacccaacagaggacgagacagcaggttgatctgggagaataggaagaagacccaggaacatgtccccacccccagcccctgaacagacgtttttctgaccagactcccacatacaggtggtcctggcgcttaaaggccttgctgcagattttgcagacgtgcttcctttcctggctgtgtgtcaggtagtgcttgctcagagaactggcgctgctgaacaccttcccgcacaggctgcagtccagaagtgggttttgaggggaactgtgctgccgctttcctttcctggcactccccgaggtggcccttcctccttcgtcagcctctttagccttaagcacacctagccccaggtctaaacagagggagaaagcacaggttatacacagccaaggcaaccaagcgaaaagcacgactaaggcactctacacctcttagaaccatggtggccttgtaagtgttgcgcgagaactcttgctccacacaaagtaaacaaggttcaggagcaggtgaggggaacagaagccctgcaggatggcacccggacttggtgccacgtgtggagggatgactgcagactgaagcccttccagagcagcatgaccacaatgggctgggctttatgaccacaccatcacctggtactcttggaacggcaattagaaatatattatccaaaaccttggaaaagtagaaatccttgcacacacccagccaattctgtttttggggttttcacataaggaaataaatgtagctttgtacaaagatctagctgcaagggagtaaactgtcatactgcttttcctggtgaaatgttataaacaacctaatatctgggttgggtgtggtagctcacacctgtaatcccagcactttgggaggctgaagcaggcggatcatttgaggtcaggagttcaggacgagcctggccaacatggtgaaaccccgtctctaccaaaaatacaaaaattagctgggcatggtggtgtgtgtctgtaatcccggctatttgggaggctgaggcacgagaactgcttgaacccaggaggcggaagctgcagtaagctgagatagcaccactgcactctagcctgggcgacagagtgggactctgtcaaagaaaaagaaaaagaaagaaagaaagacaggaaggaaggaaggaggaaggaaggaaggaaagagagagagaaagagagagagagaaagagaaagaaaggaaggaaggaaggaaagaaggaaagagaaagagaaagataaggagagaagcaaagaaagaaaggaaagaaaaagaaaaagaaaggaaaagaaagaaagaaaagaaagaaagaatcagatggactagtaggattattagctggttttattttcctctttttgtataggtaaattgtttatattttatgtatcccttggataaaatgataaaatatatagttatgaatcacatcacccaagaaatagttaaaggaactgggaatattcagtttggagaggtcagacgtcttcaaatatctgaagggccagtgtatacaggagacagcagactgcttctgtcttgctctaagtacagtggtgcgatcacagctcattgcagtctctaagtcctgggctcaagtgatcctcccacctcagcctactgagtagctgggactacacgggccaccaccactcccagctgatttttaaattgttatttgttgtagagctaggcttggtgaatgaaaattaaagggaagctgacctcacaccactggaaacatagggtttggccttgctcactgctgtgttctcagatgcgagagttcccattctggcactcacaggcactcaataactgtatgttagatgaaggaataataaaagatttttctactttttagattgacctgaaaggtggattagactgtctttttttttttaattttttttttttttgagactgagtcttactctgttgcccaggctagagggcagtggcgcaatctcggctcactgcaacctctgcctcccaggttcaagcctcagcctctgcagtagctgggactacaggtacctgccaccatgtccaactaacttttgtatttttagtagagatggggtttcaccatgttggccaggctggtctcgaacttctggcctcaggtgatccacccacctcagcctcccaaagtgctgggattacaggtgtgagccaccgcgcccagcctgcctttttaacttcttatttcttattattttcttgatagagatggggtctcactatgttgtccaggctagagtgcaggggttattcacagacgcaatcatagctcaccgcagccttgaactcctgggcgtgagcagtccttctgactcagcctcccaagcaggtgagactacacgtgcacaccaccatgcccagctaatttttatttttatttcttgagacagggtcttattctgtcacccaggctacagtacagtggtgcgatcacagctcattgcagtctctaagtcctggtctcaagtgatcctcccacctcagcctattgagtagcacgggccaccaccaccccagctgatttttaaattgttatttgttgtagagatggggtctcactatgttgcccaggttagtctcaatctcctggactcaagcaatcctcctgacttggcctcccaaagtgctgggattacaggcgtgaaccatacatagcacctggcttaaactgccttatgagatggcaagtttgtttgtttgttgagatggagtctcactcagtcacccacgctggagtgcaatggcgccatcttggctcactgcaacctctgcctcctgggttcaagtgattctcctgcgtcagcctcctgagtggctgagattagaggcgcctgccaccatgccaggctaattcttatatttttagtagagacggggttttgccatgttggccaggctagtctcaaacttctggcctcaagcgatcctcccacctcagcctcccaaagtgctgggattacaaagtgcatgagccactgtgcccagccaagatggcaagtttggaaataataatttatcagggatactatggagatgggatccaagaattcaatgggccagggcatgggaagagcaggaggttgctctaaaggatccaatcgtgcaaattctctgtggctcatgagatgcagtgtgacagacacagcagaagggaaactgggctgggagtcttgaggcctagactctcctcccaatcctgcctgtggccatttgtcatggaacttgcttggcctttgtctttgtcctctgagaaattactataatgagtagtcaaataactccaacagtttcaacaaggaaaaaccgggctccctcaggcaaaagtccttagccttactcagtcacttaaaaatgcctattaaaatcgagaccatcctggctaacatggtgaaaccccgtctctactaaaaatacaaaaaattagctgggggcagtggcgggcgcctgtggtcccagctactagggaggctgaggcaggagaatggcatgaacccgggaggcggagcttgcagtgagccgagatcgcaccactgcactctagcctgggcgatagagcgagactccatctcaaaaaaaaaaaaaaaaaaaaaaaaaaaaagcctattaaagcaactataaaactagaaaacaaaacgtttttaaaaattggcaaggaggccgggcacggtggcttatgcctgtaatcccagcactttgggaggccgaggagggtggatcatgaggtcaggagtttgagaccagtctggccaagatggtgaaaccccgtctctactaaaaatacaaaaattagctgggcgtggtgggggacacctgtaatcccagctactcgggaggctgaggcaggagaatcgcctgaacccgggaggtggaggttgcagtgagccaagattgcaccattacactctaacctggtgacagagaaagactccgtctcaaaaaaataaataaataaataaaaattggcaaggacactgaaaaacaggcaaacagaggaactagcctgggaagtcacttgatcttcttagaaaccagtgttataagggctctacagttttttaacatttatttatttatttatttgttgagatggagtctcactctgttgcccagcctggagtgcagtagcatgatctcagctcactgtaacctccatctcccagattcaagcagttctcctgcctcagcctcccgagtagctgggattacaggcacccaccaccatgccaggctaattctttttttttttttttttttgagacggagtcttgctctgttgccaggctggagtgctgtggtgcaatctcggctcactgcaacctccgactccctggttcaagcgattttcctgcctcagcctcccaagtagctgggattacaggcacgtaccaccacacccagataatttttgtatttttagtagacagatttcactatgttagccaggatggtcttgaactcctgacctcatgatccgcctgcctcggcctcccaaagtgctgggattacaggcgtgagccaccacgcctggccaaattattgtatttttagtagagatggggtttcgccatgttggctgggctggagtggaactccttatctcaagcgatccgcccacctcagcctcccaaagtactaggattataggcatgagccaccatgtccggccagagctataaaattgtttaatgctccgtctgggtaaactgactttgaggaaaatattcaaagaactaatccaaaagaaaactcaacatgtacaaagttgttcacagaaacactttaacagtccaaacagcaagaatatggtctaacagtccaatggaatagctatttcagtgaccctcagtatgaaggtctaccttcaatatgaaagcaaatacaccaactcttacaacttaaatggaattatatacttaatattatctctgcaagactatgtatgtctgactttacccacgtttaaaaatttacaagtgaggtcaggtgtggtggttcacacctgtaatcccaagcactttggaaggccaaggtaggcagattgcttgagctcagttcgagaccagactgggaaacatagtgaaaccccttcactactaaaaatacaaaagttagctgggtgtggtggcacacacttgtaatcccagctactcaggaggctgaggcgggagaatcacttgaacctgggaggcagaggttgcaatgagccgagattgtgccactgcactccagcctgggcgacagagcgagactccgtctcaaaaaaaaagaaaacaaaacaaacaaaaaaaccacgaatatctcgccagtgctttaaggtctatgaagtgtgtttacaatagttccttcttttgttttactctggggggaagcagagaggatattattgtccacctgctttatggataaagacactggggtctaagaaggcctgacaaccaaagatcagaagggaccggaccccagttcattctggaaatgtgacatcagcctctaaggtgtggtaatgggaaggaaagtcttcagtaaatgctaacatctgcccacacaccacacaaaagataaggatatccccagacacctaagtttctgaacattattccctagaatgagtgttctgtttcctttactaagaattgggggccgagtgtggtggctcacgcctgcaatcccaccactttgggaggcggaggtgggaggatcacttgaggtcaggagttcgagaccagcctggccaatatgatgaaaccccatctctactaaaaatacaaaaattagccgggcatggtggcaggcgcctgtaatcccagctactggggaggctgaggcaggagaattgcttgaacccggaagccagaggttgcagtgagccaagaatgcaccactgtactctgcctaaaaaaaaaaaaaaagaattggccgggtgcggtggctcatgcctgtaatcccagcactttgggaggctgaggcgggcggatcatgaggtcaggagatcaagaccatcctggctaatgcagtgaaactccgtttctactaaaaatacaaaaaaattagccgggcgtggtggcgggcgcctgtagtcccagctactccggaggctgaggcaggagaatggtgtgaacccaggaggcggagcttgcagtgagctgagatcgcgccactgcactccagcctgggcaacagagcaagactccatctcaaaaaaaaaaaaaaaaagaattggggaatgattcccaagtaggaaaaaaggtgactgttccctaagtcacctgtaggagggaaaaattttcttaaccaatccatgcagaatcagtccctagctggccacagaaactgtcgaacatcctgcagggcccttctacccaggtgacagcctcaccttgtaaggatgcctgagactccgaatctgcgtactcctccagcagcttcacagaatcactgtccttcccggagtacagggacaaggtgtctaagttgtcctccagcacctcgctggacatgtcaggcgttgggaggctggggtccgggtccagaccactcaggccagcataaagaaagcctcgcgtgttgggacccaaatcccggttgagggtgtcgctgcagttgagcccttggctctctgaaaatgaagggaggtgcatttctgatgggagggcaccctcgtctccaaggctgtactggtccatggctctccactgccaggtcttggccaaaagctactctccagataagcaaaaccatgtaaggagacagggaggagagagcccttgatggcaactaattcctgaaaatgaagcaagaagaatgaaagttattaggtggcaaaacagcattgtgggcagagcacggacttgcaatgcaagcagacctcgatctgggtctgttctctgcctcataacagccatgtggctttgggcaagtcacttaagctccacgagccccaggtgcctcatctgtaaactgggcataagagtacttccttcacaaggttgttgtaacaaataaaagtacttccagcaacatggtggactgaactgacctcttgctccagctataaacatatacatgtatgacaaaagataattttttaacacatagcctaggtcaaaagacaggaaaaatcccaagtgccagcagcaacaagaaaactcaatgctggaggtgtaagctcacgtaggccccaggggaaaatcagaatcagatacagggcctagagccatttgtccaatatggtggccactagctccatgtggctatgaagtacttgattttttcttttaattttttacagatatcaaatcgaaaatggataattttttttaagatatggggtctcaccatgttgcccaggctggtctcgaactcctgggctcaagcgatcctcccaccttggcttcccaaagtgctgggattacaggtgtgaaccagcgcacatggccctgtgaagcacttgaaatgtggctggcttgaactgagacaggctgtgagtgtaaaatacaacctggatttggaaaactttgtacccaaaaaagtcaatttaatacgtttctatatagattaaatgtggaatgataattttttttcttttcctttttttttttttttgagatggagtctcattctgtcgcccaggctggagtgcagtggcgggatctcggctcactgcaacctctgcctcccaggttcaagtgattctactgcctgagcatcccaagtagctgggactacaggtgcacgccaccacacctggctaatttttgtatttttagtagagatagggtttcaccatgtttcccaggctgatctcgaactcctgacctcagatgatccacctgccttggcctcccaaagtgctgggattacaggcgtgagccactgagtccagcctggaatggtaatattttccatataatgggctaaatgcaacatgttattaaaattaacttcatctgcttatctttttaatgtggctcctaggaaatttagattatatatggctcgtattctgtattatcaaatgctgccctgccgtctgggacctgggatgatagcagacacgtgggtgagggaaacagggccttgagttcccaggaaacggaggcctggggccctggaagagctgaaccatccacaggaaaactaaataaatgaaaagaaaagcttcacacaagcctagaaaagtacccccaagaaccagaaaaaaatagccagtgagagatgacaaagctgagcattctacaagtctacaaaagaatgacaattaccctgatggcaaacttctcaacagaaacaagcctcgaagataagaataagaatatcatcagtggactaaggaaaagtcagccagcacagagctcaacatacaggcatgagagagggagggaggaggctgggcgccagggctcacatctgtaaccccaacactttgggaggcagaggagggaggattgcttgaggccaagagtttgagaccagcctgggcaagacagcaagactggcttctacaaaaaattaaaatatcagccaggtgtggtggcgtctatctgtagtcccagctattcagaaggctgaggcaggaggatcacttcagcctgggagcttatagacttttacacacaaggcctaagaatctaccttacagaccctggtccaaaaaatgactaaaagttttgaatcaattgggaaaaaaaaaaaagagatgatggtaacttcatacttttaagcttgcacactaaaagaatctaagtataaccaccaagagaagaaaaataaaccacataacatctaaactagtagaatttattccccccaaaatgggcagggggagtggggcagcagagtttactttaaaatactgtagggaaaagagagaaaagactcatagtactgcaactaggaattaaagaggaaacacatcactaatggccttagaaaaaataagaaggattataaaagaatactacaggccaggcgtggtggcttacgcctgtaatcccagcactttgggagaccgaggtgggcggatcatgaggtcaggagatcgagaccatcccggctaacacggtgaaaccccatctctattaaaaatacaaaaaattagccgggcatggtggtgggcgcctgtagtcccagctactcgggaggctgaggcaggagaatggtatgaacccaggaggcggagcttgcagtgagccgagatcgtgccactgcactccagcctgggcaacagagcgagactccatctcaaaaaataaataaataaataaatagaaataaaataatactataaacaactgtattcagataattaaaaaattagataacttagatacattaacttagttatttaaattagataacagattaaaatgggcaaactgctagaaagatacaaattaccaaaacttactcaagaagaaacagaatttcttttttttttttgagatggagtttcgctctgtcgcccaggctggagtacagtggcgcaatctcagctcactgcatcctccgcctcccgggtttaagcaattctctgtctcagccggattacaggtgcccaccaccacgcccagctaatttttttttttttttcctgagacagtttcactctgttgcccaggctagagtgcagtggcgccatctccgctcactgcaagctccacctcccaggttcacgccattctcctgcctcagcctcccgagtagctgggactacaggtgcccgcccccgcgcccggctaactttttgtatttttagtacagacggggtttcaccatcttggcgaggctggtcttgaacttctgacctcgtgatccacccgcctcggcctcccaaagtgctgggattacaggcgtgacccaccgcgcccagccaagaaacagaatttctgaatagacctatgagaaataaaaagactgggccaggcacagtggctcacgcctgtaatcccagcactctgggaggccgaggtgggcaaatcactggaggtcaggagtttgggaccagcctgacaaacatggtgaaaccccatctctactaaaaatacaaaaacttagctgggcatgatggtaggcacctgtaatctcagctactcaggaggctgaggcacaagaatcacttgaacccgggaagcagaggttgcagtgagctgagatcgtgccactgcactccagcctgggcaacagagtgaaactctatctcaaaaaaaagaaagaaagaaaagaaagaaagaaggaaggaaggaaggaaagaaagacagactcaactagtaattttaaagctccctgtacatcttgccatagaaacaccaaaaacaaaaaatcaactttaacaaaactctgggaagcagtcaaagctttatagcaaccaagcaaaccctaagaaaaaggtgactttgatgtttgattacaggctcacgcctgtaatcgcagcactttaggaggccgagatgggcagatcacctgaggccaggagtttgagaccagcctggccagcatagtaaaaccccatctctactgaaaatataaaagttagctgggtgtggtagtgcacgcctgtagtcccagctacttgcgaggctgaggcaggaggatcgctcgaacccaggaagcggaggttgtagtgagccgagattgtgcctctgcactccagcctgggtgacagagcaagactctgtctcaaaaaaaaaaaaaaaaaaatggtgactgaaacccagtgggagaactttgtggcatatttaacttacccctgccccatccctactccctggctcagcagtggtctcgaaggtagcagcccatgtttctggtgtgggttccctggtgctggagggaacagagaggatctggttttcaaagaacagtggttgtctgtctgacctgtcagtggctccctgaaagcccaatgcaaagatcttgcctttttttgtacctaactggcagctctctggggtgcagagtggctacagacagggcgtttgttgcaaacattaaagtcaaatgaactagatgctgcaggctggcgcaaaagatattgattggggcaaacaactgacttgctaaaagccagggaggaaaagctgggaagttggatactttggagaaataaaggctttgaaaaaatgagccaggcatggtggctcatgcttgttatgccagcattttgggaggccgaggcaggtgaatcacctgacatcaggagtttgagaccagcctggccaacacggtgaaactccgtttccactaaaaacacaaaaattagctgggcatggtggcaggtgcctgtaatcccagctgcttgggaggctgaggcaggagaatcacttgaatgtgggaggtggaggttgcaatgagccaagattgcgccactgcactccagcctaggagacaagggcaaaactctgtcccaaaaaaaaaaaaaaaaaaaagtccacactggcagtttcttataaagctacacatagtttttttctgcatctatttgatgattgtaatatatatatgtataaaatcttatcatgcaatccagcaactacactcttaggcatccatccaactgagctgaaaacttcagtccacacaaaagcctgcacacacatgtttatagcagctttgttcataactgcccaaaactggaagcaatcaagacatccctcaataggtgaatggatcaacaaactgtggaacatccagacaatggaatgttcttcaggaataaaaagcaataagctatcaaaccacacaatgacatggaggaaccttaaatgcacattgctaagtgaaggaagccagtatgaaaagattacataccgaaaaaaaagaaagacaagactacatactgtgagactccaactatatcacattctggaaaaggcaaaactatagagacaataaaaagaccagcagttgtgtggtttgtggggtgaggagtgaaactattttgcatgataatctaatgctgcatacctgacattataccatagtcaaaacccacagaactatacaacacagagactgagctctggctgggtgtggtggctcacacctgtaatcccagcactttggcccaggagtttgacaaagtcagaccctgtctctatgaaaaaaaatttttttttaattagctgggcatggtggcacatgcttgtggtttcagctacttgggaggctgaggagggtgaatcgcttgagcccaagaattggaggcttcattgagctatgattgcgccactgcactccagcctgggcaacaaagtgataccctgtctcaaaataattaattaattaagtattaaaaaaattaaaaaatccaaatgaataaaaaaagagcttccacatattcctgggaatttagaaggtggcatctcagggtgggcacatgtttggaaaggaccagagaaggcttccaagctctcacctctggctgaccttcgctctgtgcaggcagagagtgaaggcgaaggtagggttgttaaccgcctgcctgagtgtggaagcagtgccccgctgcaactactgggagctttttgttttttgttttctgttttgttttttttttagctccaggagtttaagaagatctctgttaagtcactagctgaccactaaactaacagaacagactactgaccacaccccacaaagaacacaatctttacaaaaatagcttagaaaagccactaaacaaacagttacaacccacaataagcagaaacaaccaagcctgaggacagggaagaaaggaagaatcccattcccagagttaccagactgcaatatgcaaaatatccagtttacaggctgggtgcagtggctcacgcctgtaatcccagcattttgggaggccgaggcgggtggatcacctgaggtcaggagttcaagactggcctggccaacatggcgaacccccgtccctactaaaaatataaaaattagctggctgtggtggcaggcacctgcaatcccagctacacgggaggctgaggcaggagaatcgcttgaactcgggaggtggaggctgcagtgagccaagatcgtgccactgcactccagcctgggcgacagagactgtctccccaaaaaaaacaaaaacaggccaggcgcgctggctcatgcctgtaacccctgcactttgggaggtccgggagggcggatcacttgaggtcaggagttcaagaccagcctggccaacatggtgaaacgccatctctactaaaaatacaaaaattagctgggcgtggtggtgtgtgcctgtaatgccagctactcaggaagctgaggcaggagaatcgcttgaacccgggagatggagtctgcagtgagttgagattgtgccactgcactccagcctgggtgacagactgagactccatttcaaaaaaaactaaaaacaaaaaacaaaacaaaaaaaaccaaacagataaaatgtccagttttcgaatcatggaagcttgagaaaaatgagagatcgagtttttcagcaaaaaattatgagtcatgaaaacaaaaaagcatagccccttcagatggccatctgtctcacacaaatggaatcagatgacctgtggccttctgtgtctggcttctttcactaagcacagtgttttcaaggttcacccccattgcagcacgtgtcactgctccatttctttccagggctaaataatgttcccctgtctggagagaccacattttgtttaaccactctcctgttgatgaacatttgggttacttccatttgggggctattgtgaataattctgctcacacctagatgttaaagaaatgcttcatgactcactgaataacaaatctagtgcatacttgaataacgggagtttgggactagatttctaggccaccagtttctactttctaagaacttttcatgttgatatgtaatagaacctctgcacctgcaatgtctgcattgcatgttatatgtctacctgcctgtctgcgtgtatgcagcctattgaggcagcacaaatttaaagtcacatacaggtacgtaatcccatatacaactctgagacccaactgagtttcagaatttgagggggttttagaagtgtaaatcaatgcataccccgtattttaagtaacttccagtggggttcaaggcagtacctggtaaccaaataattatttctgcatcattgcctatgaccactcagcgtacgtgaaataaaggctgtgaaaagcaacatgtagggtcaggtttggccaccagatgatattcgagatgcctcaggattctcagagctttttgggtttccaaaaaatcagggagaggagtgtggatctgtaagccaaattcaaatttcaccagttccacagtgtctgctacagtgctgctataaactgttttcaccactctatgaggggaaaaacccatctccccctgcatctcccaataataaaaacaagtgaataaaaatcacatatatattttttgagacgaagtcttgctgtgtcccctaggctagagtgcagtggtgcaatctcggctcactgcaacctctgcctcctgggttcaagcaattctcttgtctcagcctcccagtacctgggattacaggcactcaccaccacgcctggcaaatttttgtacttttagtagagatagggtttcaccacgctggtcaggctggtctcaaactcctgacctcaggtgatccacccgcctcggcctcccaaagtgctgggattacaggcataagcccccgcgcctggcctaaaaatcgtatttattaagcactttctccacatcgggtatcataccaagtgctttatatgcattaacttacttctcacaaaaacctagattgtagtattacttcccttttacaaataagagagactaatttgtccaaagtcaaaacccaacagccagatcttaaacccagatactctgacattagcgctaatggtcttgcccattacacagtactgattccctataaactgaactgtatactgcactgctccaattaaactacaaaacacataaggtgctgggtcagggggaagaatgtctctggactccccaaggccaaatcacctgctttccaatatactcccatagtccacagaacaaactggtcaggttacaacctcagacaggcaagccaaaagtccaaaggccatgccttgatatttacatccttctccagacagtaaagcaaaaccctctctaccgatactgagcttccttttattctgtcaacaaatacattcaattcaacaagagttttagcaccttctaggtacaaaactctctgctagcccttacgaggcagagtttatggtctcctgcaacccggcagacattcccaaggacccaaatactctttccaagaattttatcattttgtgttttcatttaaatgctcaacatcactaacgatcagggaaatgcaaatcagaaccacaatgggataccaccttactcctgcaagaatggccgtaatcaaaaaataaaaaaataacagatgttggcatggatgcggtgaacaagaaacctttctacactgctggtgggaatgtaaactagtacagccactatagaaaacagtgtggacattccttaaagaacaaaaagtggaactaccatttgatccagcaatctcactcctgggtatctacccagaggaaaagaagtcattataagaaaaagatacttgcacatgcatgtttagagcagcataatttgcaattccaaaaatacggaaccagcccaaatgcccaccatcaatcaaggagtggataaagaaatatatatatgatggaatactactcagccataaaaaggaacgaaataatggcattcacagcaacctggattgaactggagactattattcttctaagtgaagtaactcaggaatggaaaatcaaacatcgtatgttctcactttgtaagtgagagctaagctatgaggattaaaggcataagaatgatacaatggactttggggacttggggggaaagggtgggaggggatgagggataaaagactacaaattgggttcaatgtatactgcttgggtgatgggtacactaaaatcttacaaatcaccactaaagaacttactcatataaccgagtaccacctgttcccccaaaatctatggaaataaaaaactaaaaaaagaaaaaagaaaagaaaaacccagtacatctggatcattagaggactcccttgtaaccgagtactaccatgtggtttcaatgcctgggtgtgtttatgattgcactcatgccaaaaaggactacttaattgcttcaggctaaaaagaagaggatggagggggatttagttcataataatgccttcgggctctactagaggccagctggcatcacggtacaaatggaagttttgctgcagttcaaattgagacaagggatgggagaattgagacctcacagggcctgctaaacccaaaagggcccagagtggcagtcggcaaagtaattgtttcaaggagcaggtaagtttcaggaaatggtatccctctcattaaattaaatcggtttggttgctttgtttatatttaatttgcaaattgattttggctttatagctgcacaggagctatacactttaggaacttatgtcttgttctatcatcactgatgccttaatagttttaaaacaatttaagtcaacattggggatccgaagcaattttaattttttttcttttaaaaaaatgctatcagcccagcgcagtggctcacgtctgtaatcccagcattttgggaagctgaggtgtgcggatcacttgaggtcaggagttcgagaccagactggccaacatggcgaaaccccgtctctactaaaaatacaaaaattagccgcgcatggtggtgggtgcctgtaaccccagctactcaggaggctgaggcccaagaatctcttggacccgggaggcggaggttgcagtgagccaagattgtgccactgcactccagcctgggtgacagagtgagactccatctcaaaaaaaaataaaataaaatttaaaggggccatcattccatgactggtgggggtgaggggaaacaaaggattcttctatgaaatgctacgaccttttgggaaggtaacctaccatgagattctagactgtagaagtaagtccacaatagataaataatatttactatgtgtgttgtttggaggggagggaacaatctgaatgcccatctgatttacaaatatattttatttagtctgcaatatatttaaatatgtttccattagttatccagttaaagaatagatggggccaggtatggtggctcacacctataatcccaccactttggacagctgaggcaggcagatcacctgaggtcaggagttcaagaccagcctgaccaatatagtgaaaccccatctctaccaaaactacaaaaattagctcggcatagtggcactcacctgtagtaccagctactcaggaggctgaggcaggagaattgcttgaacttgggaggcggaggttgcagtgagccaagatcatgccactgcactccatcctggtgacaaagccagactccatctcaaaaataaataaataaataaaataaggccaggtgcggtggctcacacctgtaatcccagcactttgggaggctgaggcgggcggatcacaaggtcaggagattgagaccatcctggctaacatggtgaaaccccgtctttactaaaaatacaaaaaattagccaggcgtggtggcgggtgcctgtagtcccagctactcgggaggctgaggcaggagaatggcatgaacccgggaggcggagcttgcagtgagccaagatcaggccgctgcactccagcctgggccacagagcgagactccatctcaaaaataaataaataaataaataaaataaaataaataatagaaaaatagatggatagagcactagagcatcactatccaaaagcactttctgtgctactaagcctgcactgcccaatactgcagtctttagccacatacacagaaatgcagctaacacccttgaggaactaaactctttattttatttaagtttagttaaatttatttatttatttatttatttagagacagagtctcactgtgtcacccaggctggagtgtagtggtgcaatctcagttcactgcaacctccacctcctgggctcaagtgattctcctgcctcagcctcctgagtagctggggattacaggcgcccgccatcatgcccagctaatttttgtatttttagtagagatggggtttcaccatgttggctaagctgggtctcgaactccttacctcaaatgatccgccctcctcggcttcccaaagcgctgggattacaggcgtgcgccaccgcgcctggccagttaaatttaaacaggtacaagcggctaatggctaccatatcagatggtgcaaatctagggatttctcattcaagttaggctttccaacttctatttaaaaatgtgaaagaaaaaatcagaagatctgccaatgctgagtccacattcctgcaaggcaacaattggttggaggtgagaagcccccaccactccctattctctcagctcactgatttctgtgccctgccaggcctctggaggcatctgagtttatgaccctccaaatgaaaccctccaaactcaggcttaaatgtcacctccactatagagaacacttccaacataacaaagtctgagattaatttctccctcctctgaaccctgacaagcacttgtgtaacaatccacttaacatttactctaaattatctaggaagttaattatctttaaagttctcccattttctccagactctcagctctaggatggctgggactcggccttaggtgtctaaacttctcacagtatcttgcctagcacagaactttgatcacagaaggctctgagcatccttttcattcatgagtgacagaattccattgtgccacctcttttcctctttgaaaagctccaaccactgttctgccaccacaccccccacctcctaagcaccaccttctcccttctctccctgcatccatgttaccagggaaagggtcatcaagtctgagtaacagcaggttcctgggagttgagcagacagacttgcagctttcaccctagctatgcaatttccttcattttattttattttattttttgagacagggtcttactctgtcgcccagactggagtgcagtggcgtgatctcggctcactgaacctccacctcgcggattcaagcgattctcccatctcagccacccgagtagctgggtttacaagcatgtgccaccacacctggctaatttttgtatttttaatagagacagggttttgccatgttggccaggctggcctcgacctcctgccgtcaagcaatccacctgcctcagcctcccaaagtgctggtattacaggtgcaagccactgcacccggcctgcaatttccttccttactttcctactccaattttttttgttttcctgagttgaagtctctctctgtcactcaggctggagtgcaatggcgtggccttggctcattgcaacctccgcctcctgggttcaagtgattttcctcctcaaccttccgagtagctgggactacaggtgcacaccaccacactgggctaatttttgtatttttagtagagacgaggtttcactatgttggccaggctggtctcaaactcctgacctcgtgatccacccacctcggcctctcaaaatgctaggattacaggcgtgagccactgtgcccagcctccactccaaatattattgtaaactatagacccattttgtttggcctacacagtatttttacaaattggattagtcatcaacatttttttttaatggggagatttcaccttcctatatggatttctggtttcttttgaaaatgattagatttgatattccttcacagttaacaacgaggtagatctgagggacaaatggcatctctagaaagggcttatggtctccagttttcccagccctcacttatcttcctgcctggcccttataatattcatcattgtaataataataataataataacagtgaacatttattgaggctttatgacatgccaggtactcttgtaatcacttgtatgtcatcgtatttaattcccacaatacttgaggcatatactgtattattaaccctatttcaccaatgaggtaaatagtccagagaagttgagtaacttgcccaaaaccaagctaggattcaaccctgggtagtctaatttcgaaacccttacgcttgcccgctccactatgcttttatcacacacttgagactgggactcctgcttcacactcgtgcctacattcttaagtagaacaatcaagaaagacttccagctgggcaaggtcattctcgcctgtaatcccagcactttctgaggcctaggtaggaagattgcttgagtccaggagttcaagaccagcccgggcaacaaagtgagatccccgccgccccccacccatctctacaaaaaaaatcaaaaattagccaggtgtggtggtgcacacctgtggtcccagctactcgggagactgaagcagaaggattgcttgatgttgggaggtcgaggctccagtgagccaggatcacaccacggcactccagcctgggcaaacagcgaaaccctgtctcaagaaaagaaaggagaaaagaaaagagcaaaacaaagcacaaagactccctcctatagtcttatagttatgtaaccaataactaattttaaccagaaggtaaagtcattttctctggccgggcacggtggctcacgactctaattccagcactttgggaggctgaggcgggcagatcacaaggtcaggagatcgagaccatcctggctaacacggtgaaatcctgtctgtactaaaaatacaaaaaattagccaggagtggtagcgggtgcctgttgtcccagctactcgggaggctgaggcaggagaatggtgtgaacccaggaggtagagcttgcagcaagccgagatcactccactgcactccagcctgggcgacagagcgagactccatctccaaaaaaaaaaaagtccattttggctgggcgtggtggttcatgcctgtaatcccagcactttgggaggctgacgcaggcagatcactggaggccaggagtttgagaccgccttgccaacatggtgaaaacccgtctctactaaaaatacaaaaattagccgggcatggtggtgggcacctgtaatcccaggtactcaggaggctgaggcatgagaatcacttgaacctgggaggtagagtttgcagtgagctgagatagtgccaatgcactccagtctgggcgacagagcaagactctgtcctaaaaaaaaaaaaaaaaaaaaaaaagcgcattttgtttttttgtttatatataatgggtttattactgcccttttaaaatcaattaataaacattttgaaagttgattagtttaaacttctaatacagcaaatgccagtagataaagtttacataaacaaaaattctctacagccttcaataatttttaagtgcaaaggggtcttaagagcaaaagttttaaattagctgggcgtggtggtgcacgcctgcagtcccagctacttgggaggctgaggcaggagaattgcttgaacccaggaggcagaggttgcagtgagccgagatcgcaccactgcactccagcctgggaaacagagagagactccatctcaaaaagaaaaaaaaaaaaaaagtttgagaactactattccaataagaaaaagtcctgcatgtccacatacacatgtgcccaagcagacacgcatctaaaagaaagaaacccgaaactgaaaattccaaagtggtggccggcaggcatattttataagttccctatgctgtcttttttttttttgagacggagtctcgctctgttgcccaggttggagtgcagtggtgcaatctcggctcaccacaacctccgcctcccaggttcaagcgattctcatgcttcagccttcccagtagctgggactacaggcgcctgccaccacatccaactaattttttgtatttttagtagagacagggttttactatattggccaggctggtctcaaactcctcagccgcctcggcctcccaaagtgctgggattacaggcatgagccactgcgcccagcctacgctgtcttatttaattcttaaattatcaaatgtgttgctagcatttaaaaatcagaaggtttcacctaaggatagttttctggcctcttctcaaagaaatcgaaagttctggcaacactggcctggcatttccactgcctggcatcacttagatgggacatacaatctttgcttcacgacaatccttacttcttccctttacctgtgccttacctgtaagtatctgagttgccaccctgagctagggaaggaaaaacgttttttgcaataaacatcaataaagaaacacacatcaatctatgtctgcactcctcctaacaggtcaacatgcacaataaatagcccttttccctgtttgacttctccaaagcagtaacttgtatgattaccattagtacggactttggtattgcttagaaaccctcttgagaaagaacgagatctatccaacaaagcaggtgtctttggctcagtgcaaaggaaggaaactcaccagaagagcaagttagtgaatctccagggaacaggaggacccagtttaggccccacagggagggggttcaggtgacaagcagaccactggatatgtcctcctggaacactgagtggtaaatgcaggatactcccaatttcttttgccctgaaagcaggtggtgggaaggaagaagcagtcaggacttgggtcccaaagaaacaagaacagagatgtgaaaatggagaagagcaacaatttttggaagaaggcagaaagcagtatcaacagcggagatttgagtgaggaggaaaggtttttttggtaagaagaaataattgttccttctttccttatttttcccccgtgggaagagacctagagaattttaccgggagaaacttaattagggcagaattggtgataaaataaggatatttgctggaaagttgggggtaggtgaggaggactggaaacataaatattagacgagagagaaactggaaggaattagttggtttgttctaagcgaagatattccaaaaaggggcactctaggtgtgaagaaaaaaattttgctggaaagtgatcctgaacggatgaaaaaaaactgggttaattttttttctttttttgcgctaagggaagttacttaaaggagggggaggggcatgtcaaggaaaggaggagagatttggagttttgctggaagatcctaaaaagggataaatctgggtgccccaaagtgggactatggaggaggaagggggattctgagcagaaggggcctggaagaggctagcgaatgcaaggcccagatgcagaaggtggggaggtcgggtagggcccgcggcgcgagctggggggctgcgagggggcagttgaggcccggggggacggagtgggaaagaaaagggggtgcagcgggccaggggatcctgaggagggtcttctccaagggggaagggcctgtggggtgcagcggggcccggagctgttgggttgcagaagatgcgtgcgtgacgcagggtgaggggcgcccgccgcgcctgctgcgcccctcgaaaggcagatggggccccctaaaaaaagaaatcaagaaacgaatgagattgtaaaaagggggaggggttgaaaaaagaggaaataatagtaatgggggataaggaggaaagggaggggcaggggcagcagcaaccgggttttacccgcccccgggggctcgcgcgccgggcctcgcgcctggcgcctcgcggggctcccagcggcctcccgccttccccgcgccgcccggggcgcacgcgcagcccggcccacccccggatctcctcgctcacgcgcggcgcaggcgcgcgtacgtgaccgcgggccgcctcacgcctcccagagcggcctcgcgcgtgcctcctggccgcgcgctctcggctgcttctccgaggggcggggcttgccgcgggcgggaaaggaggcggttggtcgccattttgggagggggcggttgagggcggagagtgagaagagtgagccggggaggagcggcggggggaggggccagtcccccaagacccgcatcccgaggccgagagtcccgggagcctccactccagccattgttcctggtgggcggtgttagaacgcggtggcggccgctggatggctgcccccagtccccggaggggcctctgagcagcgtcctggtgctgggaggccgtatcgtctgtttccgaggaccctgtcgcgagcgcgggagtctctcagggtctcttctgcgtcattgggtgggggagatgtggggcgagctgctcctccctttttttaaaatttttttcagagacagggtctctccctgttccccaggctgcgatcacggctgccgcaccctccccttcctgggctcaggcgatcctcctgcctcagtctcttgagtagcagcgaccacaggcgggcgccgccacaccttgctaatttttacattttttttagagataaggtctcgccatgttgcccaggctagcctggttcccctgggctcaagcgatcctcctgcctcagtctcccaaagcattgggattataggtgagagccaccgcgcccagcctattcctcccttctttggggaaaggctgagccatctggggcccctgctccgtgctgagctgtgttgggaagggcggtaggccctggtgccgactggccaaggaccatcttttttttctttttttttttttttgagacagggtcttgttctgccgcccaggctggagttcagtggtgcgatctcggctcactgcaatctccgcctcccgggttaaagcgattctcctgtctcagcctcccgagtagctgggattacaggcacgtgccaccacgcccggctaatttgttgtattttcagtagagacggggtttcaccatgttggccaggctggtcttaaattcctgacctcgggtgatcaggtgatccgcctgcttctgcctcccaaagtgctgggattacagacctgagccaccgtgcccgacctggccaaggggtttgaactgtcctgcaactgaggcagataattcattccttagaaacggagtgctgaagatctgtggagaatgagagcagattagtggttgcccggggtggaaaggggcatcgcggatcttatctgggtaatggaaatattctaaaactgagctatgggccaggcgtggtggctcacgcctgtaatcccagctctttgggaggccaaggtaggaggatcccttgagcctaggagtttgagaccaacctgggcaacctagtgaaaccctgtctctaaaaaaaaaaaaaaaaaaaaattaactggagatggtggcatgcgcctgtagtcccagctacttgggaggctgaggcaggaggatcgcttgagcctgggagtccaaggctgcagtgagctatatgatcaggccattgcaccccagactgggggatagagcgagactctgatgggggaaaaaaagggttatggtgatggttgcacaactcagtaaatttctaaaaatcagtaagtatacacttaagtgagtgacttttatgtaaattatacctcaaagttttttttttttttaattgattattgggggaggaaacagaggaaagaagagggcctgtcatcttgctttaggatcccttcatttagcaagtttttattgggtctctgttctaggtgctcagatatagtgtctgggtcaaacagacattcctctcctcctggaacttatgttttagagcagtgctgttcagtagtaataaaatgcaaacttcaagcaccagccacttatgtaattttacattttctagtagccatgtttaaaaggaacaaaatgtaaagaaggcaggtgtggcggctggcacttgtagcccagctacttgtgaggctgagacaggaggatcacttgaacccaagagttggagactgcagtgagctatggccctgtctgtgtagagccactgcaccagcctgggcaacatagtgggacccattctcttaaaaaaaaaaaaaaatggcttgggacgggtgtggtggttcacacctgtaatctcaacactttgagaggctgaggcaggaggattgcttgagttcaggaggtcaagaccagcctgggcaacacacccaaacctaaaaatcaaataaataaaagtaaataataaaataaaagagaaagaaacacaagtgaaattaatttggtaatatttaatcccaaatatttcaacacattatcagtataaaaactaagagataatttacacttttggggctgtctttaaaaccccacatatacagtattttacattcacgggacatctcaattcagaccagccacatttccagggctccatggaaccttgtagcgagtggctctggtactgacagcatacctctacagggggacaagcaaatgcatttactttttttgttgtatttttttgatacagggtctcactatgtcacctaggctgaagtgcattgttgtaatcatgcctcgctgcatccttgacttcctgggcccaagctattataccacctcagcctcctgagtagctggtactacaggcctgcaccaccacacccagctaattttttgtatttttagtagagacagggttttgccatgttggccaggctggttttgaactcctaggctcaagcagtcttcctgccttggcctcccaacatgctgggattacaggagtgagccaccgtgcctggctgcaaatacatttataatgcagtatgttataccttgaagaaaaacaaaggaaagaggatggggtcagagggtattgttttatacaggtcagtaaaggcttctctggtgagattgcattgagcagagatctgaaggaagtaaggaagggtcctatgaaaatatctgggggaagaagagagggaacagcacgtgcacaggcactgaggcaggaagatgtggaacccttttgaaagacagcagagaggccaggcatggtggcttatgcttgtaatcccagcaatttggggggcccaggtaggctgatcacttgagcccaggagttcgagaccagcctggccaacatgttgaaaccccatctctactaaaaatacaaaaaattatctgggcatggtggtgcacacctgtagtcccagctactcgggaggctgaggcatgagaatctcttgaacctgggaggcagcggttgcagtgagccgagatcacgccattgtgctccatccttggtaacagagtgagactctgtctcaaaaaaaaaaaaaaaatcagaagaagagagaccagtgtggccagaaccacgtgagtgaagaaactaggggcagatggcatagggacttacaggtcatgctaaggcaggaattaaactcctggaaacaatttcagagggttcttcctttatttagcacactttttgttttgtggggttttttgtttgtttcttttattttctttctttttttcttttttctttttcttcttttttttcttttgagacagagtcgcgctctgtaacccaggctggagtgcagtggcaccatctcggctcaatgcaacctctgtctcctgggttcaagtgattctcctgcctcagccttctaagtacctgggattacaggctcgtgccaccacgcccagctaattttttgtatttttagtagagacggggttccaccatgttagccaggatggtctccatctcctgacctcgtgatccacccgcctcagctcccaaagtgctaggattacaggtgagagccactgtgcctggccttcttttctttttcttgttttctttttttttttcgcttatttagcacacattttaaaaatgctttgtttcagccatgtaatctctcttcttgatggaggaaataaggatcctagccactggacagatgagaatctagttaaaaaacaggacttaagctcctgaaataaattagcatcttctgtcattgatagacattgaacacttcatggacacagaagataaatgcaacacataaacaaaaaattagcattagccaagcatgcttgtaatcccagcactttgggaggccaaggcaggtggatcacctgaggtcaggagttcgagaccagcctggccaacatggtgaaacgtccatctccactaaaaatacaaaacttagccaggtgtgctggtgcgtgcctgtaatcccagctacgcaggaagttgagacaggagaattgcttgaacctgggaggttgagtctgcagtgagccgagatcgcaccattgcactccaggctgggcaacagagcgagactctgtctcaaataaaaaaaagcatttagcatttattttaaaggcctacaaattaaggtgacaacctaataaaaaaaaagaatataagatttgaagaggcacttcatacaagaggaaacatgaagtgaggactaaccacaacaacaagagaatgcaaattaaaaccaaagataccgcagcacacctaccacttcggtgaatcaaaaaacatttttttttttctgtttgctgaagcaagacgaactgagtatacaggactagtgacaggtaaaattggtagaaccacactgacaaacccaggggttaactctagaaaacttcttgatcatgtgcgccaagagatgcaacagaagaacaagcagcaatgtttgtaatagcaaaaaaaagaacagaaaagaaaggaaagaaacagattggatcctggattctggattgaataatcctggaacaagataaataaataaataaataaataggccaggcatggtggctcacgcctgtaatcccagccctgtgggaggccgaggcaggtggataacttgaggtcgagaatttgagaccatcctggtcaacatggtgaaaccccatctctactaaaaatataaaaattagctgggcatggtggtaggcacctgtaatccagctaaggcttaggaggctgaggcaggagaatcgcttgaatttgggaggtggaagttgctgtcagtgagctgagatggtgccactgcactccagcctgggaaacagagtgacagtgacttcatctaaaaaaaaaaaaaaagacattacttaaaaaactagagaaatctccaacaaaggccaggcatctgtaattccagcactttgggaccccaaggcaggaggatcacttgagctcaggagttcaagaccaccctgggcaacttggtgagatcctgtctctacgaaaaaattttaaaagttacccaagcatagtagcacacacctgtggtcccagctactccacaggctaaggcgagaggattgctttagctcaggactgcattcctatctggttaacagagcaagactgtctcaaaaaaaaaaaagaaaaaatctcaacaaagattggaatttagttaatagtaatgtatccactttttggggtttttttttttttttgagacagagtctcgctctgtcgcccaggctggagtgcagtggcgcaatctcagcttgctgtaagctccgcctcccgggttcacgccattctcctgcctcagcctcccgagtagctgggactacaggcgcccgacaccacgcccagctaatttttgtatttttagtagatggggtttcaccgtgttagtcaagatggtctcgatctcctgacctcgtgatctgccggcctcggcctcccaaatgctgggattacaggcgtgagccaccacgcccagccttttttttttttgagatggagtctggctctgtctcccaggctgcagtgcaatagcatgatcttgactcactgcaaccaccgcctcccaggttctgcctcagcctccagagtagctgggattacaggcgcccgtcaccacacccaactaatttttatacttttagtagagacggagtttcaccatgttggccagggtggtctagaactcatcctgacctcaggtgatccgcccgcctcagcctcccaaagtgctgaaattacaggcatgaaccattgcaccccgcctgttttgtgtgtgtgtgttttttttttttttttttttgagacagggtctcattctgtcgcccaggctgcagtgcagtggtgccatctgggctcactgcaatctccgcctcccaggttcaagccattctcctgcctcaccctcctgagtagctgggactacagaagtgcaccaccatgcctggcttatacattttttattttttggtagtgacggggtttcactgtgttagccaggctggtctcaaactcctggcctcaggtgagccgcctgcctcggccttccaaagtatgaggattttaggcatgagccaccgagcctggccaatgtttttgtagttttgacaaatgtatagttgtgtcacttaacaacggagatctgtctgagagatgtatcttcaggtgattttttccttgttgcgtgaacgtcgtaagctgtacaaacccagatggtatagcctagcacacagctaggctgtatggtgtagcctattgttcctaggctacaaacatgcagcatgcaactgtactgaatactgtaggcagctgaaacacaaaggtaagtatttgtgcatcaaaacatagaaaggtacagtagaccaggcgtggtggctcatgcctgtaatcccagcactttggaggccgaggcaggtggatcacctgaggtcaggagttcgacaccagcctggacaacatggtaaaaccccatctctacttaaaatacaaaaattagccaggtgtggtggcaggcacctgtaatcccagctacttgggaggctgaggcaggagaatcacttgaacctgggaggcggaggctgcagtgagccgagacctcgccactgtactccagcctaggcgatagagcgagagtccatctcaaacaaaaaagaaaagaaaagaaaagaaaaaagaaaaggtacagtaaaaatacagtattataatcttacaggacctctgtcatatgtgtagttcttattggccaaaacgttgttatgtggcacatgactgtcctgtgataaagtaagatgccaacatcagggaaagggtgagggggatgtggtaactctttgtaccatctttccaagtttccagtaaatttaaaattactccaaaataaaaagtttagggtgaaaaaagaaggaaaggaaatgaaaatgtccacctataggagactggataaatcgtggtatagttattcaatggagtattatgcagcagtgaaaatgagtcaatttccattacacacagcaacacagatgtgctcccatttacatataacatttcaacagggtgtggtgaatcgtgtctgtaatcccagcactttgggaggccgagccaggaggcatcacttgaggccaggagttcaagaccagcctggaccacatggcaagaaaaattaaaaataaactgggcatggtggcgtgatctgcctgtagttccagcttctcaggaggcagaggtgagaggaacacttgagccctggaggtcgaggttgcagtgagccatgatcccaccgctgcactccagcctgggcaacacagtgagactctgtctcaaaaataaatatcatttcaaaacacaggcaaagctaaacaataagcagtttagggacatagatagaattattattttttttaaagtaagggagccaggcatggtggcacacacctgtggtcccagatactcgggaggctgaggcaggaggatcacttgggaccaggagttctgggctgtagtacactatgccaatgcagggtccacgctaagtttggcatcagtttggtggcctcctgagagcgggggatcaccaggttgcctaaggaggggtgaactggcccatgttggaaatggagcaggtcaaaactcctgtgttaatcactggtgggatcatgcctgtgcatagccactgcactccatcctgggcaacatagcaagaccctatctcttaaaaaaagaaaaaactagccagatgtggtggcatgtgcctatagtcccagctactcaggaggctgaggtgggaggatcgcatgagcccaggagtccgaggttgcagtgaactatgattgtaccactggactccagcctggtctacaaaatgtgaccttatctctcataaacaaaacaaaacaaaataaaatggaagcccctgagaagctaagggaaaagatgctcttcagaaggagaggggtacaccctggccgcaggttcctcttctctgccaaccttttcctgttgtctccatctattcactttgttcagcattgctttctgtgatttgtcttttgaatcacgtccttcaagcattctcacactcctcactcctctcggcctctaaaggactcacctggccaaactccagccatcctcttctctgtgccagccgagcccagcagaaggaaaccacccagccagcccaacgggttttacctgaatcagagaaatcacaggcctcagacaggcgcagggcactctctatgtgtctctggtgtgcttacatttcccccctgccctccagcccatgactaggtcccacacttccctgtgcacatagaagccatcagaagggaacccccttgtcatctgtccctgtgattccctctctcaaggattggggtctccctccctccttccttccttccttctttccttccttccttccttccttccctgcctcccgcccttccttccttccttctctccctccctccctgccttccttccttccttcttcccttccacctccctccttctctccctctttcctcttccattgaagtttctcctcctctcctcctcctcccccctcctcctcttcctcctccttttcctcctcccctcctcctcctcttcctctgcctgtcctcctcctcccctcctcttcatcctccccttgtcctcctcctcttcctttccccctcctcctcctcttccttccccctcctcctcccctcctccttccctcctcttcctctcctcctcctcttcctcctgccctcccccctctttctcctccctcctcttcatttcctcctcttctcctctttctcttcctgtctcctatatcattcatcatctctctctccttctgccaaatcatgcccatcactatcctcaaatgctcctgcctcttccattcattttttaaaaagaattcctcccttgagggaaccgagagataagagagactgtagccacaaatcaaccacatgcaacccaaggactttggatgctgagtcgaacagaccaatgttttgtttcgttttgtttttaaattatcagacaagtagagaaatctgaactctgactgcctattcgatgataggaaagaattatggtgcattttttagatggatcacgggattgtggttatatttctataaacaaaccttatctccagagatatgaaatgaataatctgtacatgaaatgatgtgatgtctgggatgtgttttaaaactatctagtggggtgagggtggggccaatgagagacggtagaaatgaaacagcattggccatgagttgataattggtgaggcccagtgaccggcatgtggagttaatcatactcttttatttttatatatatttgaaaatgggcttatttaaaagtgatgtaaaaattcctctctttggctggctgcagtggctcacacctgtaatcccagcacttggggaggccaaggtgggcagatcacctaaggttgggagtttgagaccagcctgatcaacgtggagaaactctgtctctactaaaaatacaaaattagccaggcgtgctggtgcatgcctgtaatcccagctactggggaggctgaagcaggagaattgcttgaacctgggaggtggaggttgcagtgagccaagatcacaccactgcactccagcttgggtgacagagactctgtctcataaataaataaataaataaataaataaataaataaataaataaaatacaacaaaatcacacaataaaatccaacatccctcgccacatcctgtaaatctggtctgtccaccctctggcctcacctccactctctgttcaggcttgctctcctccaagcacaccaacagagcaagttcctatatgctgttccctctttccagaagattcacctggcttcttccctcccctcctcagtctatgctcaattgtcccctgctgggaggttccttccactgactattctctccagtttattttcttcgggaagctcatctctacctgacatcacgtcacacctggttgtttgttgatcgtcagtctctctgctagaatgtaagcttcatgctggcaggggctttgtctgttttgttgcctagaacagtgcctggcacgcagtagataattaattttttttttttttttagagatggcattttactctgttgcccaggctggtctgaaactcctgagctcaagcgatccccccacctcagcctcccaaagtgtgtgagccactgcacccagctaataattaatactttttaattttttttgagacagggtctcactctgtggcccaggctggagtgcagtggcacaatcaaagctcactgcagccttgacctccccaggttctggtgattctcccagctcagcctcctgagtagatgggactacaggcatgcaccaccatacccagctaatgtttgtgttttttgtagagacagggtttcgccatgttgcccaggctaatctcaaactcctgggctcaagcaatctacccaccttggcctcccaaatattacttttaaaataaatgaatttaaatctgccagtctctgacaaaatcttatttggccacagttgctttggatgtaaaaacatgcataagtaaggctgggtgcagtggatttacccagacagagcattacccagcatttacccagacagagccggacacgatggcttatacctgtaatcccagcattctgggaggctgaggtgggtggatcaattgaagtcaggagttcaagaccagcctggccagcatggtgaaaccctgtctctattaaaaatacaaaaattagctgggtgtggtggcttgcgcctgtaattccacctactcaggatgctgaggcacgaaaatcgcttgaacccaggaggtggaggttgcaaggttgcagtgagctgagatcgcaccactacattccagcctgggtgacagagtgagactctgtctcaaaaaaaaaaagatgtggctgggcatggtggctcatgcctgtaatcccagcattttaggaggccgaggtgggcagatcactttaggtcaggagttcaagactcaggagtttgagactagcctggccaacaaagtgaaaccccatctctatccaaaatacaaaaattagctgggtgtggtggcacacacctgtaatcccagatactcgggaagcggaggcatgagaattacttgaacccaggaggcggaggttgcagtgagctgagattgtgccactgcactccagcctgggtggcagagtgagactctgtcttaaaaaaaataaaaacggctgggcacggtggctcacgcctgtaatcccagcactttgggaggccgaggcgggcggatcacgaagtcaggagatcgagaccatccttgctaacacagtgaaaccctgtctctactaaaaatacaaaaaattagccgggcgtggtggtgggcgcttgtagtcccagctactcaggaggctgaggcgggagaatggcgtgaacctgggaggcggagcttgcagtgagctgagattgcaccaccgcactccagcctgggcaacagagcaagactccgtctcaaaataaaaattaaaattaaaattaaaaaataaaaaataaaaacatacataaataaaacaccgtcttccatcttcagctcagtctacatggtttctgtcataccactcctctatttgtcatgtccaatggtgggggagatcatctcaatcttgatgaaaccactcctatacattttataaagttaatcaggacagggagaaatgaaaataaacccagctggctgggcgtggtggctcacgcttgtaatcccagcgctttgggaggcccaggcgggaggatcacctgaggtcaggagttcgagattagcctggccaacgtataaaaccccgtctctactaaaaatacaaaaattagcctggtgtggtggcatgtgcctgtagtcccagctactcgggaggctgaggcaggagaatcgcttgaacctaggaggcagaggtcacagtgagccaaaattgtgtcactgcactccagcctgggtgacagagtgagactctgtctcaaaaaagaaaaaaaagaaaagaaaaaaaagaaaaggaaaaaaaagaaaagaggcccatcttccgcacactcagcattaattgtgaggccagctggctctctgacctgtttccccacaattgttttgtgcctattgtcctaaaatcatgtagaccttgttaccagattctacttcccctcaactgctctgtaaatgacaacttaaacatgataaaacgttaagttttctttttgagatgttccctcaggtcctgcatgctgatgaaatgactctgccagctgatctgagggaccccatgagatgctgactcaccaaagcatgcgatttccacgtttgggattatttcactcctttccctgaccaatcaacagggccaattctccagtcctttgtccttcatgatcacctcaaaaatcccagcccagaactcctcgggaagacgaattgagggtctgcttccctctcctccctcagtgccccacaatcattagatcctttctctgctgcaaaccctgctgtctctgtgcaattggtctgttgctgcacagcaggcatacaaacctgttgttcctgtaacactgagggagggtatggaacccaggggttgggggactgaaagggcctcatatgggaggggacaggttcttacgagaccgtcggtagcaggggtcttcattggccctgtccttcctaaagcagcctcctctaagctgacttgatgccacacaagtctgttctcctcctaggaagaagtcgctgttggcaacatccccacccagccccactctcctatcccccagctgctagtggctcccagctgtccctccaaggcaagtttccttcagcaaaaccacctctcctgggaggctacacctggtaacccccagccactggccgactgaccagcctgggcaacatagcaagaccttatctctactaaaattttttttgaaagttaacaaggcatggtgacatgtgcctgtagtcctagctacttgggaggctgaggcaggaggatcccttgagcccaggagttcgaggatgcagtgagccacgattatgccactgcactccagcctcagtgacagagtgaaaccctgtttctttttttgtttttgtttttttagacggggtctcattctgtcacccaggctggagtgcagtggcatgatctcggctcactgcagcctctgcctcccaggctcaggcgatcctctcacctcggcctcctgagtagctgggactacaggctcgtgacaccatgtctggctaattttttttacttttattttttatttttggtagagacagggtttcaccatgttgcccaggctggtcttgaactcctgaactgaagcaatccacctgccttggcctcccaaagtgctgggattacaggcatgagccactgtgcccagccaagagtgagaccctgttattaaaaaaaaattaaaaaaagaaaattaagggagagggagagaaggaaaaagaaataattttggatttcctttgtcattcaataagtactaaactatgaggtgttggggtggccatatttctatatctgatcttagcatctcccttttaccagttagctacagctgtgtaacaaatcaccaaaaaacatagtggcataaaataacaaccatattttttttttctcatgtgtatttgagtcctcaagattatcctggtgacccgggccaggctcagatgaccttggctgggctcactcatgcatctgtggtcctctggtgggttgaccagagactggctggtttggaatgccttcagctgggatgactcagttcttccctacctttctctcacattcctccagcaagctggcccacacatgttctcatggcgaagacagaggagcaagagatagaagagaaatacgcaaagcccaaggcctgttcatgaagctggtacatttttgttcttttttttgtttgtttgttttgttttggagacagagtctcaccgtgtcacccaggctggagtgcaatggtgtgatcttggctcactgcaacctctgcctcctgggttcaagcaattctcctgcttcagcctcccaagtagctgagattatagctgtgtgccaccacacctggctaatttttgtatttttagtagagacggggttttgccatgttggccaggctggtctccaactcctgacctcaagtgatccgcctgcatcagcctcccgaagtgctgggattacaggcgcgagccaccacgcccggcctgggcttctactttctcactcctcttcccagtcagtcaccattctacctttttgtgggtcagtcctcttgtttccatccccacgcctccacactggtccaggccaccatcacttctcgcctggaccgacaatgacaatgacacataagggttggaggtggaggttatggggtgggggttggccctgggtttcaatcctggttctgctgtgtagtagctgagtgccctcaggagagtgactttacctctctgtgcctcagtttcctcctccataaagtggggatgattagctgggcatagtggtgcgtgcttgtagtcttagctactcaggagtctgaggcgggaggatcccttgagcccaggaatttgaggttgcagtgagctatgattgcgccactgcactccagcctaagtgacaaagcaagaaactgcctaaaaaaaaaaaaaaataggccaggcatgatggctcacacctgtattccaagagctttgaaagacccaggtggggccaggtgcagtggctcacacctataatcccagcactttgggaggctgacacgggtggatcacctgaggtcaggagttcgagaccagcatgaccaacatggtgaaaccccgcctctactaaaaacacaaaaaattagccgggcatggtggcaggtgcctgtagtcccagctacttaggaggctgatgcaggaggattgcttgagcccaggaggctgaggtgcagtgagctatgattgaaccactgcacattccagcctgggtgacaaagtgagaccctgtctgtaaaataaaagtaaaaataaatatgccaggtgcaatggctcatgcctgtaatcccagcactttgggggactgagatgggtggatcacttgaggtcaggagtttgagaccagcctggcccacataagtgaaaccctgtctctactaaaatatacaaaaattagccagatgtggtggtgcaaacctgtactcccagctactcgagagtctgaggcaccagaatcatttgaacctgggaggcagaggttgccatgagctgagcctgcactccaacctgggtgacagagtgagagtgtgtctgaaaataaataaataaataaaataaaaagaacagtgattggcacacagttgtcacgccataaatgtatttactgtttgcaataaggagaggtttgttctcaggtaacaaaacatacactagagctataatcattaacacggtgtggtgtggggcacaaaaacccacaagtaggccaggcatggtggcttccactgtaatcccagcactttgggaggccaaggcaggcagatctcttgaggccaggagttcgaggccagcacggcgaaaaccacatctctaccaaaaatacaaacattagcaggttgtgatagtgagtgcctgtagtcccagctacttgggaggctaaggcatgagcatcgcttgaacccaggagacagaggttgcagtaagctgagattgtgccactgcactccagcctgggtgtcagagggaaactctgtctcaaaataaagaaataaagaaatggaaataaaaataataaagtggggatgaggataacacctacttgtaaggttgtttcttgaggggatccagaaagtaaccatatctgaagaactcaggactgtcctgggttgtgtaattgactggaataaatggcggatgggatggtgttgggaaattgattccgactgatgggcaaggtttgtgctcagcacatccctggtctcacaccaatcctaggagttagtcccatttttctgacgcagtagttgaggcttaaagaagttcagtcacatgcccaaggccacagttcctgaaaagctgggccaagacttgaactgagatctttctgattcctaagtttctctttcctattgtaagcaccggctttctccctggtctccctgcttgccctcttattccccctccgatcttttcttcccatgtcagccaaagggattccaggaaagggcaaagatgattaagttttttccttcctaagatccttcggccatgtgacttgatgcaatgtatgatcctgtgttgaatcctgggctggggaaaacattgctataaaggattttattgagacaaacagatttgaatttgtggattaaacaattgtattattgtatcaacgtttcatttcctgtttctgattcttgttctggattttttaaagagcatgtctttgtttttagtaacgtcatgctgaaggatttagggatcaagggacacgacgtcttccactgcctctcaaatgttcagaaaagaaacatacagcagaggtggccaaatgttactgacttgcgaatccaggaaagatctacttacctttcttgctagttttctgtaagcttgaaattattgctggtaaaaaacaaaacaacaacaaagcaaaccttcattccactcctaggtagatatccaagagaaatgaaaacatatattgacacaaaaaacctgttatgggtgggtgtggtggctcacacctgtaagcccagcactttgggaggctgaggctggtcaatcagttgacatcaagagtttgagaccagatggccaacatggtgaaaccctgtctgtactaaaaatacaaaaaataaaaattagccaggtgtggttgcgggcgcctgtaatcccagctactcgtgagactgaggcaggagaatcacttgaacccaggaggtggaggttgcagtgagccgagattgcaccactgcactccagcctaggagacagagcgagactccgtctcaaaataaatataaataaataaaaaaataggtgttcaaacaataacttgtacataaatgtccatagcaacactattcacaacagccaaaacaacactattcgcaacagccaaaagagagaaacgtccatcaacaagtgaactgataagtgaaatgtggtctatccatacaatggaatgttattcagccataaaaaggaatgaagtacttactgatactttttttttcttttttttttttttttgagatggaatttccctcttgttgcccaggctggagtgtaatggcacgatctcggctcactgcaacctccgcctcctgggttcaagcaattctcctgcctcagcctcccgagtagctgggattacaggcatgcgccaccacaccaggctaattttgtatttgtagtagagatggtgtttccccatgttggtcagactggtctcgaactgacctgaggtgatctgcccgccttggcctcccaaagtgctgggattacaggtgtgagccactgcgcctggccaaagtactgctacttgaatggatgaaccttgagaacattatgctaactgaaggaagcctgtcataagggactacacactgtatgactatttttatgaaatatccagaacagacaagtccatggagacagaaagtagattgatagttgcccagacctgggggacgggagataggaagcgactactaacgggccagcggttttgtgctgggatactgagatgttctgaagctacatagtgatgatgtttgcacagcactgggaatatatgaaaaaccattgaattatacattttaaaatgatgaattttgagccaggtacagtggtgtgtgcttgtaatcccagctactttggaggctgaggctggaagacggccggagcccaggaattcaagaccagtctgggcaacatagcaagatcctgtctctactaaaaaaaattaaaaattggctgggcgcagtagctcacgcctgtaatcccagcactttgggaggccaagcggggccagcctgaccaacatggagaaaccccatctctactaaaaatacaaaattagccgagcatggtggtgcatgcctgtaatcccagttactcgggaggctgaggcaggagaattgagaacttgggagccggaggttgcggggagccgagatcatgccattgcactccagcctcggcaacaagagcgaaactctgtcccccaaaaaataaataaataaataaggagttttatggtaggcaaattatatcagaatttttcttttttttttttttgagactgagtcttgctctgttgcccaggttgaagggcagtggtgtgatctcagtcaccaaaacttctgtctcctgggttaaagtgattctcctgcctcagcctcccaagtagctggaactacaggcacccactaccatgcccagctaatattttgtgtttttagtagagatggggcttcactatgttggccaggctggtctcaaactcctgacctcaggtgatcctccctcctcggcctcccaaattgctgggattacaagcatgagccaccgcacatggccgaattatgtaacaattaaaaaaaacagcaaacactttaatgactgtagattacctctggggtcaaaccccaaatccctggtgtacctgcaagtctgccctgtccctcagaccatctcagccaaactgctgactttctagccacctgcctttcctccttccccagtgctaggcctttgcatctcctcttcccttccaccctcatctgacaactctattcatctcacaagtcttagctgactggccaggagcggaggctcacacctgtaattccaacacttcaggaggccaagaccagagggttgcttgagcccaggagttcaagaccagcctgggcaacatggtgaaaccccatctctacaaaacatacaaaaaacttagccaggtatggtggcacgcatctgtagtcccagttattcgggaggctgaagtgggaggatcacctaagcccaggaagtcaaggctgcagtgagccatgatcataccactacactccagcctgggcgacagactgggactctgtctcaaaattaaaattaaaattaaattaggccaggtgtgatggctcatgtctgtaatctcagcactttgggaggccaaagtggtcagttcacttgaggtcaggagttcaagaccagcctggccaacatggtctctactaaagatacaaaaattagctgggcgttgtggcaggcacctgtaatcccagctactcgggagactgaggcaggagaatggtgtgaacccgagaggtggagtttgcagtgagccgagatagcgccactgcactccagcctgggcaacagagcgagactccgtctcaaaaaaaaaaaaaaaaaaaattaaacaacctggagcttgagatcggcactggaagtagggaacaggcttggctcagtggcttacacctgtaatcccatcccagcactttgggaggccaagggggacggatcatttgagcttcagagttcaagaccagcttggccaaaatggtgaaactgtctctactaaaaatacaaaaaattagccaggtgtggtggtgggtgcctgtaatcccagctacttgggagggaggctgaggcatgagaatcacttgaaccccggaggcggaggttgcagtgagcagaaatcacaccactgcactccagcctgggtgacacagggagactccatctcaaaaaaaaaaaaaaaaaaaaaagagctcagtaactcaggcctataatcccagcactttgggaggccaaggcgggcagatgacctggggtcaagagttccagaccagcctggccaacatggcgaaaccccatctctactaaaaatacaaaaatgacttggtcgtggtggcgggcgcctgtaatcccagctacctgggagactgaggcagaagaatcgcttgaacccgggaggcagaggttgctgtgagctgagattgtgccatagcactccagcctgggcaactcttttgagacagagcgagactctgtctcaaaaaaaaaaaagaagtggggggcaatcttgtgggactcagccttcaacctgtgggatctgatgctgtctccaggtagatagtgtcagaagtgaattgaattggaggacaggctggtgtcccctggggggagaagatccccctcatatctagtgacagagcgtgttgtgagtgtgtcgtgggacaaactgtttgtgtattcctctattctcagaattccctgcactgtcttttcctaacaattcctctttatcctcctcctcctccaggaagccttcccaaaccccaggctgggtcaggtgcctgctctgagctcccacatccccaggactcactccccctatccactttagggagaagtctgtaacctccacagacccgagagttccacgaggtagaccccagggtctcccagtaaccgccacagagcagataccgacaaacactcattgcattgacctaacctcactccaccaccatctccccagacctctcggttcttgccttccaccagcccctcaccaaccatttttggctcttctccttgcctatgctgctgccatatgtatgattttttattttacttaatttaatttaatttatttatttaaggtggagtcttactctgtcacctaggctggaatgcagtggggccatcttggctcactgcaaccttcacctcccaggttcaagcgattctcctgcctcagcctccccaatagctgagactacaggcacacaccaccacacccagctaatttttttctctctcttttttttttttttgttgttgttgagacggagtcttgctctgttgcccacactggagtgcagtggtgtgatctcggctcactgcaagctccacctcccgggttcacaccattctcctgcctcagcctcccaagtagctgggactacaggcgcctgccaccacgcccggctaattttgttttatatttttagtagagacggggtttcactgtgttagcaagtatggtctcgatctcctgacctcgtgatccgcccacctcagcctcccaaagtgctgggattacaggagtgagacaccgtgcccagccacgcccagctattttttttttttttttttttgtatttttagtagagacgggattttgccatgttgtccaggctgatctcgaactcctgatctcaagtgatccacctgtctcagcatcccaaagtgctgggattataggtgtgagccaccgtgcctggtctgtattattttttatttttatttatttaattattattatttgtttttgagatgaagtttcactcttgttacccaggctggagtgcaatggtgtgatcttggctcaccacaaccttcgcctcccaggttcaagcagttctcctgcctcagcctcccaagtagctgggattacagggatgcactaccacgatcggctaattttgtatttttagtagagatggggtttcatcatgtgggtcagggtggtatccaactcctgacttcaggtgatccacccacctcggcctcccaaagtgctgggattacaggtgtgagccatcacacccagccttatttcccacgccgagacagagtcttgctctgtcgcccaggctagagtgcagtggcaacatctcgactcactgcaaactccgcctcccgggttcaagcaattctcctgcctcagcctcccgaggagctgggattgcaggcatgtgctaccaggcccagctaatttttgtgtttttagtagagacggggtttcaccatgttggccaggctggtctcgaactcctgaccccgtgatctgcctgcctctgccatccaaagtgctgggataacaggcgtgagctactgagcccaatcaatttttaaaaatcatatatactcaacacctttgcttttaaaaaacccttaagcattttttaaaatacaattttgttttatttcagatggagtcttgctgttgtcggcctgggctggagtgcaatggcgcgatctcagctcactgcaacctctgcctcctgggttccagcaattctcctgcctcaccctcccgagtagctgagattacaggcgcctgccaccacacccggctaatttttgcatttttagtagagacagggtttcaccatgttggccaggctggtcttgaactcctgacctcaggcgatccactcaccttggcctcccaaagggctgggattccaactatgagccaccgagcccggcctattttttcctcttttgatcgtgatgattctagtgggtgtgaggttgtatctcattgtggttttgacttccatttccctaatactgatgactgagcatcctttcctgtgtttcttggccatttcctcaccaccttctgcaagctgacctcagccctcaccacctcactgaaccatcatttccaccttcaccagtccagtggtttatcttaatttcccttcttttctctctcagcaactttggacacttcctccctcgccagccattcttggtcttcgtcttccttttctggagagaaatgtaagaacttaggccagttagttaacttctctgtgcctcggttcttcatctgtgaaatgaagatgacaacagctcctacttcaaggttgctgtgaagattccatcagctaatgtatgtaaagggctcagaagtgttgggaggccttggccaggcgcggtggctcacgcctgtaattccagcactttgggaggccgaggcgggtggatcacgaggtcaggagttcaagaccagcctggccaagatggtgaaaccctgtctctactaaaaatacaaaaaattagccgggtgtggcagcgggcgcctgtaatcccagctactcgggaggctgaggcagagaattgcttgaacctgggaggtgcaggttgcagtgatcgaagatcgtgccactgcactccagccttggcaacagaccaagactccgtctcaaaaaaaaagaagtgttggaaggcccaggcaggcgcatcattggagcccaggagtttgagtccagtctgggcaacatggtgaaaccctgtctctacaaaaaatacaaaaattagtcaggtgtggtggtgtgtgcctttattcccagctagccaggaggctgaggtaggaggattgcttgaggccaaggggttgaggctgcagtgaactatgattgcctgtagtcccagctactcgggagactgaggcaggagaattgatggaacctgggaggtggaggttgcagtgagctgagatcgcgccactgcactccagcctgggtgacagacggagactctgtctcaaaaaaataaataaataggccaggcgtggtggctcacgcctgtaatgccagcactttaggaggctgagttggggagatcacaaggtcagaagatcgagaccatcctggccaacatggtgaaaccctgtctctaccgaaaatacaaaaattaggtgggtgtggtggctcatgcctgtagtcccagctactctggaagctgaggcaggagaattgcttgaacccaggaggcggaggttgcagtgagccaaggttgcgtcactgcactccagcatggcgacagtgagactctgtctcaaaataataaaaataaataaataaatataattttaggaaaagtcaccagaaattcaaaacaaaaacaaactccgttgcagaaatcggatgtgaaaattgttcactttcattcagaatctgcgggtcggccaggcgcagtggctcatgcctgtaatcccagcactttgggaggctaaggcaggcggatcatgaggtcaggagatagagaccatcctggctagcacagtgaaaccccgtctctactaaaaacacaaaaaattagccaggtgtggtgatgggcgcctgtagtcccagctactccggaggctgaggcaggagaatggcgtgaacccgggaggcagagcttgcagtgagccgagatcgtgccactgcactccagcctgggccacagagtgagactctgtctcaaaaaaaaaaaaaaaaaaaaaaaaatctgcgggctgaagccaggtgcggtggctcatgcctgtaatcccagcactttgggaggctgaggtgggtggataacaagttcaagagatcaagaccatcctggccaacatggtgaaaccccgtctctactaaaaatacaaaaattagctgggtgtggtggcacacacctgtactcccagctacttgggaggctgaggcaggagaataacttgaaaccaggaggcagaggttgcagtgagctgagatcacaccacggcactccagcctggcgacagagcaagactctgtctcaaaaaaaaaaaaaaaaaaaaaaaagaataaacagaatctgcttaagattcttatatctttagcttttaaaacaatacatctaaagacagaaaacgtttacatggcacagtgtaatgtggtgattaagagtatgaattttggagcaggtgcagtggctcacatctgtaatcccagcactttgggaggccaaggcaggaggatctcttgagcccatgtgttcgagaccagcctgggaaacaggacaagacctcatctctacagaaaaataaaaatagattagccaagcatggtggtggcacctgtggtcccagccactgtggaggctgaggttggaggatcacttggacccaggaagtcaagtggtgaacacgttgttgcactccagtcagcgagatccctgctagaaaaaaaaaagtataaattttggaacagggctgcaaatccctgtgccccctgactctgacaattttgcaacttctctatgactcagtttccgtatcagcaggaggtgatattagcatatcctacctgctaggattgttggaggcattcaatgagagcatccaagtacagaaagaagctcggttaagcattacttataactacattgtaaatccccctctagccatgggtgacttttatagccatctgaacaatgtttcacaaaccctgtagtaaaaaggggatgatccgcctgtctcggccccgcaaagtgcaggattacaggtgtgagccaccgcactcagccgagatctgttaacagactccaaatctcgacttagtctcattgctgcaagcggtctactcattctctcctccagatcttcgggaacagagtaataataaaaatcaaaacccagccagctcttcctctgtcagtggtgttgaccagcagagaccgcttcccttcttaaaggggcctttcctagtttcgactttctcttctctttcctaagatggcctggtgcgtttctcctgtcaccctcccccaagcatagccaaggaagcggcccctcccacatagttggaatgttaaatatctcagtgatgactacaaggcttaaagcaacaaataaataaagccactcttgagtcagaatattttatttggtggtgcatgagtaacaatacccgataaatgaagacacattcttagcgtgttctctatcccccaaacgctgcggggtgcaggggctgcgggggctgcaggtgggaggtccacagcctctagggcaggagctctagggcaagagcaggagcaaagggacatgtggatgaaaacgggaaattctcagaatttgtgtatttattggattttttgtgtgtatttctttgaatgtttttgtgtatttgatttttttgtgtgtgcacgtatttgaatattttgtgtgtatttttttgaataggtgacactaggctcaaactttacaaaggtagaaaaagacctaacatccacccacccctgtttccccacggaaaactgctgtgaccagtttgctttttttttttttttccctagacaaagtctcgctctgtcacccaggctggagtgcagtagcggctcaccgcaacctccgcctcccaggatcaagcgattctccttgctcagcctcccgagtagctgggattacaggcgcgcgccaccatgcccggctaattttttgtatttttagtagaaatggggttttgccatgttggccagtctggtctcgaactcctgacctcatgtgatccgcccgcctcggcctcccaaagacctgggattacaggcgtgagccaccgcgccctgccgcagttcgcttctgcttttcaagatattctgtgtatttaacaagcaaaagcttgtattttttcatctccaccttttacatttttatacctttttttttctcctctcctaccttgtcaggctacatagctcataccgtgtcagttcaagtatcccttcctcgttttacggtgactccgcatcccattgcgggccgcaccactgcttatctgagtcccccatcgatggacaactaggttgtttctggtctttttttttttttcccacaaatttttacgagaacaacaacaaaaaaaacaatgctactcaacctcaccccttggttagtgtttgtcaaaaaacggacaggcagaagccccaacctgcgccccccaacgcccgactctccgcatccgccgagggtaccccagctccagggatcgcggtgctcagggaccgcgcgtccaggactggccctgcctcccagaagctgtcaggcggcggccgtggcccgctgtagccccgccccgtggcccgcccgcagtaggcccgattcaaatctggccaatgatagtgtgtaaacaaacccaggccccgcctcccgacgaataatcccccgaccggcgagaggcccatttaacccgatggggtttggggttgggacggtgatggagtcgtggctccgcccccagacctgggccaataggcggctgggctccgcccccggcacttgccgcgctgaggacccgaggcagggctgggcgcgcagttgcctgatttcgtggcggctcgcagtctgggcgctccgggcgctcggcgcgggcgggcagggccaggagctggggcggcgcactccgcggtcccagccgcatttgaagggagcggtcagagggcggagatcgccccggcatcaatgccctctcatcccccactttatttccaccgcctagctgctaaaatccggacccggaaacgtctccaatgggaacttgttcccctcgcccctatttaacagaacctggaggggacgcaggggtgtttttggattgggcaaggctttcatttctttcccctggttcttacatgcatacgggaaaatgcacgtatcttgtgcgccgctctacagaaaactaaaactccatgtggcaccagcagcctcccaggtcgagaaacaacttgggttggagaaattttcttttcgtttctttgcttttctttctttctttctttctttttgagacggagtttcgctcttgtcgcccaagctggagtgcaatggcgcgatctcggctcacccacaacctccgcctcccgggttcaagcgattctcctgtctcagcctcccgagtagctgggattacaggcatgcgccaccacgccttgctaatttttgtatttctagtagagacggggtttctccatgttggtcaggctggtctcgaactcccgacctcaggtaatcctcccgccttggcctcccaaagtgctgggattacagacgtgagctaccgcgcctggcctgaacattgtcataataaaatgtttggggacaggggcagatttgggtgcctgacgatacactcccattgaagagatgagaaaatggaggagctggagaagtgacttgccctaggttcatctggtgactcagccacagaacacctgggtgtactgatttagtccccaccctgcctggctggccttggggacaagtcgctgaacctgtctgggtctgactgcctaactcagtgcttaacctaggactcataacttgcgcctgattctcaaatagaaggggcgtgtcactcccgaaggacagcaggtctctttcgatctgggcccatattgatccccaacactggtctttggtcatccctttggctgcctctgaccttccccactgattctagaacagtgtggaccacactcactcattaactctgaaacttggacaggctttccaggatgtcaggggacagacaggacagagcaggaaaaacagacgtttgctctcccagggcagggattgccagggaatcaatgccctttgatccacccccttagttccactgcctggtagctaaaacccagatgctgtaccaagggatcgtttaaaaaattccatttgagaatcatatgcaagttatgagtcccccattaagaactgagttggtgcctgtaatcccaccactttgggaggccaagatggggggatcacttgaggccaagagttcgagaccagcctggccaatatgatgaaaccctgtctctactaaaaatacaaaaactagctgggcatggtggcgggtgcctgtaatcccagctgcttggaatcgcttcaacccttggaggcgcgcgttgcagtgagctgagattgcgccactgcactccagcttgcgtgactgtcaagaaagaaagaaagagaaagaaagatagagaaagagaaaggaaggaagggtgaggtggctcatgcctgtaatcccagaactttgggaggccaaggctggcagatgacaaggtcaggagttcaacaccagcctgaccaatatggtgaaaacccgtctctactaaaaatacaaaaaattagctgggcgtggtggtatgcgcgcatctgtagtcccagctacttgggaggctgaggcaggagaattgcttgaacctgggagatggaggttgcagtgagtcaagattgagccactgcactccatcctgggcgacagagcgagactccatcatctaaaaaaagaaagaaagaacgagagagagagagagagagaaagggctgggcacggtggctcacgcttgtaatcccaggactttgggaggctgaaggcaggtggatcacttgaggtcaggagttcaaaaccagcctgaccaacatggtgaaactccgtctgtactgaaaaaaataaaaataaacatttgctgggcatggtggtgcatacctataatcccagctacttgggaggctgaggcaggagaattgcttgaacctgggaggcggaggttgcagtgagccgagatcgcaccattgcactccagcctgggcaacaagagtgaaactccatctcagaaaaaaagaagagaggatagagagagaagggaaggaaggaaggaggaaagagagaaagaaaaaggagggaaaaagagaaagaaagaaagagaagaaaagaaaagaaaaaagaaaaagaaagaagtaactgagttgagcagtcagacccagacaggttcagtgacttgtcccagggtcactcaggcagggtggggactaatggctatcagccatggctaggcatggggctggcctctttttatctttttttgagacggagttttgctctcgttgcccaggctggagtgctatggcgcgatcttggctcactgcaacctccggcttccggattcaaacaattctctgtcctcagcctcctgagtagctgggattacgggcatgtgccatgatgcccagctaattttgtatttttggtagagacggggtttctccatgttggtcaggctggtctcaaactcccgacttcgggtggtccacctgcctcagcgtcccaaagtgttgggattacaggcgtgagacaccgtgcccggcctgagtttttttgtttttttgagacggaatctccctctgtcacccaggctagagtgcagtggcgcgatctcagctcactgcaacctccctcttttgggttcaagcgattctcctccctcagccttccaagtagctggtactacaggtgcgcaccaccacgcccagctaattttttctatttttgtagagatggggtttcgccgtgttgcccaggctggtctcgaactcctgagctctggcaatctgcccacctcagcctcccaaagtgctagggttacgggcgtgagccactgcacggggccagggctggcttcttgttggtgtcctctgcaccctaccagagccattccaagtggcatggccccaagaccatctccctaagaggtcaggtgtgtgtatgaggtgggtggatgttgttaatatctattcagcaaacttttattgagcatttactaagcaccaagcactgttttaggggcagtggatattctacaatgtaccaaaggaacctgggaactgccaaaaagggcatgaccaagggaggtaaactgaggctcgcaaaccgaggctaattaagcgacttatttgcttacttgcttgttggctgtgttgcctaatagattgtgagttgtgtgggaggcaaatagattgtgagttgtgtgggaggcaaatagattgtgagttgtgtgggaggcaggaacccgggtggtgttggtcaccacaggatccttgacacactagatactaaaaaaatatgaatgaatagactctgacgaagtctccagtgagtcccctagttctgagtcccccggggctggcagctatgacagaaacacaagtgctacacttcaggtcccagtgtacagtgacggcttcagatgagggctgcgtctcactttgtgggtgcgtgactgggcaaaacacttcccttctcggagccaattgagttttctacactgtatgatgggggtaactaaaggtctctcccctgtgggcagttctcatcagaaactgtgttcaccacccagttaacactctaaaagtgtagctccatcagtggctgtggaagtgcagagttaggaagactcagactatacaaacataaagtaaaaaaagtgtatactgctgcttctcagagggtccacacacctccagtgggtggtggatgatcactgcttgtttttgtttttttgtttgcttgtttgttttgtttttgagatggagtcttacttttgttgcccaggctggagtgcaatggcgtgatctcagctcactgcaacctccgcctcccaggttcaagcgattctcctgcctcagcctccccagtagctgggattacaggcgtcttctaccacgcccagctactttttgcatttttgtagagatgggggggtttcaccatgttggccaggctggtctcgaactcctgacttcaggtgatccacctgcctcggcctcccaaagtgctgggattacaggcgtgagccaccgcgcccggacttgtttttgtttttgtttgagacggagtctcactctcgccgaggctggagtgcagtggcgtgatcctggctcactgcaacctccgcctgccgggttcaagcaattctcctgcctcagcctccagagtagctgggattataggtgtgcgccaccatgcctggctaatttcttttgtgttattattattatttttttgagacagagtcttgggctgttgccaggcgagtgcagtggcgcaatctgagctcactgcaaccaccacctcccgggttcaagtgattctcctgcctcagcctcctgagtagctgggaacacaggcacatgccaccacgcctggctaatttttgtatttttagtagagacggggtttcaccatgttggccaggctggtctcaaactcctgacttcaggtgatccacctgcctcggcctcccaaaatgctgagattacaggcatgagccaccgtgcccggcctgtttgtttgtttgttttgagacagactcttgctctgttgcccaggctggagtgcagtggcgcaatcttggctcactgcagcctcgacctctggtgttcaagcaattctcgtgcctcagcatacgccaccatgccgggctgatttttgtatttttaatacattagattttgtaatttttgtattttcgctgcgttgaacaagatgctctggaacccctcacctcaagtgatctgcctgccttagcctcccaaagtgctgggattatgggtgtgagcccctacacacctgggccatggaggcttttttttcttttattgcatgatgcctaggtttggggtacgaatgagcccgtcacctaggtactgagcatagtacctgaaagttagttttgttttgtctttttttttgagacagagtctcactctgtcgcccaggctggagtgcaatggcatggtctcggctcactgcaacctctgtgtcccgggttcaagcgattctcccacttcagcctcccaagtagctgggactacaggcatatgccaccatgcctggctaagttttgtatttttagtagagacagggtttcactatgttggcgaggctggtcttgaactcctgatctcgtgttcctcctgcctcggcctcccaaagggctgggattacaggcatgagccaccatgcccgcccccgaaagttagtttttcaacatttgtctcctatccctacctccccactctggtagtccccagtgtttatctgtcccatcttcatgtccatgcatacccaatgtttacctcccacttataagtgagaagatgaggtatttggttatctgttcctgtgtcagtttgcttaggataatgacctccagctgcatctgtgttgctgcaaaggacattatttcattatttatttatttatttatttttgagacagagtcttgctctgttgcccagcctggagtgcaacggcgctatctcggctcactgcaacctccgcctcccaggctcaagtaattcccttgcctcagcctcccgagtagctgggactacaggtgcctgccaccacacccaaataatttttgtattttcagtagagatggggtttccctttgctggccaggctggtctccaactcctgacctcaagtgatccacctgcctcggcctcccaaagtgctggaattacaggtgtgagccaccgcaccaggcttcattcttttttatgactgcatagtattccatggtgtacatttatcacattttctttatccaatccactgttggtgggcacctgagttgattccatgtctttgctattgtaaatagcattgcggtgaacaccactgtactaagttatagatctatcatgcttttatgtttgggacattgcataaggtattcacttgtggaactgataacttcctgtttacttactaatgataacggccagcatttatatggcacttcctctcaggtgcagctctccctagctcattcttcctcatgaccctatgaaatgaggcctattattatcagcatgttaaagatgaggacacacagaggtgaggtaatttgtccactgtcacacagcaagaaagtggcaaaggcaggatatgaaccaggggctgactggtttcagtcagggcccttaccctctgtggtctctcaaaattaatttcttcttcttctttttttttttgagacagggtcttgctgtctcccagactggagtgcagtggcatgactatggggaactacaacctcgacttcctggactcaagcgatcctcctgcctcagcctcccaagtagctgggagtacaagcacacaccaccatgctgggctaatttttgtttggacagggtctcgctatgttgcccaggctggataaattattattattattactatttttgagacagagtttccctcttgtcgcccaggctggagtgcaatggtgtgatctcggctcactgcaacctctgccttccggattcaagcgattctcctgcctcagcctcccaagcagctgggattacaggcgtgcaccaccacacccagctaagttttgtattattagtagagaaggggtttcaccatgttggccaggctggtctcgaactcctgacctcaggtgatctaccctcctcggcctcccaaagtgttgggattacaggtgtgagccactgcgcctggccgataaattataaaaaaaaaaaatacgttgaagtaaatattatgggtagtaccgccaagatactagaacacatgttaaggcttaaaaaaacagaggccgggcactttgggaggccgagaatagcttgaacccaggggacggaggttgcggtgagcctagatcgtgccactgcactccagcctgggcgaaagagcgaaactccgtctcaaaacaaaacaaaatataacacaacaacaacaaaatcacaatctgtctcgattactcatttattcaacccgcattcacctactgtgtgcacgagcttttctagggcactggggaggcagaagggactaaaacaaagtataaatctccctgggctgcaagcatcgggagggcaggtccgggggctctgtgtccccactgggcccccagcactgcgcagcgcacacagtgggcgctcaccaagcgctcgctaagggcaacgcgtgaatccgtgtcccgccagcagggcgtttacggcctggtggggcggaaacggacccgacaccaccgcggcgtcctggggcttctgggaatcccatcagcgcggccagagcggccggggacaggctccgaggcaggcccgacccgcctccccggcgccgccgtggctcgacggagaccagctagggtgagtgatcgagccacgcctggggtcccggcctgtcaccccgaagtccccgccgccttccaccctgtcaggctccaactctgggctccggcgcggtcccacctccggggggaactcccctccatcccctccatttccttcatcctcgactcccgctatcttttcggacctgcggcgctccccctggacgcgtcctcccgccggacgaccgtcctccgcctcaggggacgcgcccaggacgcacggcgccccctccccagccggaccggcggtctgggagcgcggatcccttcagctcccccgcgccccagcatccggatcagggctcgaggcagtcgacaaactacacccgagctcgagcaggcgcgcccctgaacccccgggactggggctgggggcgggggcggcgccggcgcggagggcccagtccccggacgtccgcagcctcccattggctccgggtcccgccgctcggcctggcggggccggggctggtccgcccggacgcggggcggggattcctgaagcccctcctccggcgagggcggagggaagaggaggaggaggaggaggaggaagggggtggggggcggaacacaaaacctgagaggtttttttttttttttttccgtttgcatttaattaaaaaaaattttttttttttttgcatacccgaggggcgctccccggaacgggcgcgggcccggggcgcgcgggcctgggcgcggggcggcggcgggggcccggcagcggctgccgagcggccgccatgcgatcaggcagtgcgctgaccggcccggccggccggccccttctgggtcctccctttgcagcccgtgcggggccgtctcggagaccccgcgccgacggctgctcaaacatcagggtgagtttctcacaatgtagcaatttctctttaaatctcttaactctctctacctgcgagtcggggctgtgacagggcgcaaaagcgaggggggagtgggggttggcggcgagggtgtgtgtggggggagccggagccggggccgaacccacccccgcgacactctcacactcagccccccagccggggcgcagcgcccgctgcctccttttttttttttttttttttttcctgctcggcgcccaccgccaccggcacccccagccccgcgtctcttccaccaccgccgccgccccgatcctatggggacccccccccaaccggcttccctgcccagacccggcgcccagtgcctccccggccctcccgccggctgccggggatacaatggagcggcggagagaggagacctaacgttccacggggggaggggcgcggagaccccctccccgtcccggccccctcccctcgccccgctccccgcctttcggggaaggcgaaggccaccgggcagcgggcggtgatctcccggccggaggcggagagcctgcatctccccgcctcgctcggcccctgcgccccctccccaaatccctcccgtgggtgtcgcggacagtggggggccctggaaagctggggagggatggatggggaaggaggccaccggggctccccccttcgcaccgcccctaaacaatgaaaggagttgacttgacccccagcccccggcaatagagggaggtgaccccctcccccacccccagctgaggctcatcccggagggggccgttacgggggtggggggggtgagcgcctcctgtcacttcccgaggttcggggcggccccccatctcctacccctcggcctgggaacgggaggcaccaggcccggccggggcaccgcgctcgggtggtgacctttagacaaaggcagccctttccccggggtgagcccggacgagctgggcctgcggcctccccgggcccctgcggagggcagccaggccgcgggcacccggagggagggatggaggaggagggaggagggatggagccatctggttttcccatccctggctgcccctcgtctgcttccccgactcctgtcacgggcggccgcggggagacgagggaccaggggctgcttgggccttggtgcgcggccagccgggaggaccgggcaaggagccgcgggagagctaggctcgggctcgggcgccggcggtgattgggaggcactgcggcttcttcctctccgcgcccctttgttttgctttgtggttctgagcagctgaacttcccgggaggtggggtcagaggccgcggtgtcagctctcccggggaggcccaggtgacaggtcctagctctctggtgtccccatcctggtgggctgcagtctgtgcccaggcccatgtcctgaccatcgtccccttttgtcaccccccccccacacacacacctacctacccaccccatagtataatacagatctaggggtgcctttctcttacacctctttacggagggcacttgaaagggaaactagaaacatccaaggcatcaaggcctgagattcatgataagctctctgtgcttttaacctctcccagcacctggggtgggtgtggggggtattgtcaactctgacctgccctgggtcatgagaaaatgggaagacaactcaggaagcacccccttcccatgcactggtaggacttttgggacatgttgacctcccttgccttccctcatagctccccgctcaagatggaaatattaataacaatatcaaactagggagctttattccgctgctgctaagtacattacacgctggccacagtccaaggaggaaatagagacgggacagacattcccgttttccagacaggttcatggaggctcagagaggttaagaagcttgcccagggtcacacagccctgggtcacacagagccccaatttgtaacctcctggagtttttccagcttggctcaaaactgttaagcccttcttctgtcccaccctttggcattttgtccccctgacttcagtggacctggttcggaaatgtagataatatttagaagaagcggccagattttttttttccctgggagctggttttgagaaggggtaagatgcacctcgaagttgggctgagggcaggatcatttcacttgtggctggaatggagaattgtctgcaggaactgagaactgaaggtgtgtgaggagtgggggagggggagccccaggcctggccagtgatgggctcggggtacctgggagctggccccactgtcatcttctcccttctctacctgagcgggggacttggccccatttgctgctactcagccctgaagtagagaagagagaagctgaactgtttgggaatgttgatgtctggttgttcctatgccctgtgacccgctgtcgctttgccacaccatggccctttgatgcagctagcggagaactttcttgcctgttctccttggcatgatccactctgtaaccttaggcaggtcatttaactgctggtcctgttttctcatctgcaagtgggggtaattatagttcctttaagtgacctggaggtgggtaaaagtattatccaaacgtgtcattcatatttatcattcagcaggccgggtacgcagtgtgggcacaggggaggaatgtcaactggtggcatttaatttttttttttttttgagacagagtctcgctgtgttgcccaggctggagtgcaatggcctgatcttggttcactgcaacctctgcctcccaggttcaagcgattgtcctgcctcagcgtcccgagtagctgggattacaggcacccaccaccacacctggctaaattttgtatatttagtaaagacgggatttcaccatattggccaggctggtcttgaggtcctgacctcaggtaatctgactggcatttaaatttaaggccaggtgccatggctcacacctgtaaccccaacacttggggagaccgaggctggaggattgcttgagccctggattttaagaccagcctaggcaacacggtgagaccctgtgtctacaaaaaatgaaaaaattagttgggcatggtggcactcacctgtggtcctagctacttgggggtgctgaggtgggaggattgcttgagcctaggagtttgaagctggggtgagccgtgattgtgccactgctctcaagcctgggcaagagtgagaccctgtctcaaaaaaaaaaaataaataaaataaaaaatgtaaaggtgagtggcagaatacctttgccccagaagaattccctgtggtctgggaaggccacctgcaaacgaacaattccccttcagtgacacgcaccctctgagcgctttggggactaggcccctaccccttcagcactttacccatgcggaatacatgcttagctgtaggggctggggggctgagggagaggggctggggggctgacggagaggggctggacccagctcacccagtgtaggaggtaatacaggtgatcttgccattttacagatggggaaactgaggccaggggaagcatgttccacggccgagctgggactccaagccagacggcagagactagtggtgggggttccgtatttgtcaacagaactggggagatggtgcttcatggggtctgatcccaggagctttaagggaccccttatccccgcagccactgtcccctcctttaagtgcagttatttcccttggcgagatgacaggcataagtaataagaattctcgggggaggtgggcaggaggagaggggctgtggggacacccagatctctcaagattgagtgctggctgaatgtaggaactgatctttttggggggctggtgggagaagtccgagtgaggccctagagggtctcccggctgacttccttctcagaggcctgtggcccttccctaaccttccttcaggaggtggggtgtgccccaggctgtggaagggccaggggatcagcacccagaggcctatgaagggggagttcctgggggtgtataaggctccccaggttcccgtgggccaccttgtagcccaggtctagccagcagcccagttcccccgccagctctcaacccccacccgccaggctgccttgactccaggtctcaagaatgcagaaggctgctggtaggggaagttaattggaaacaggaaaacatggcattcctttccaggccgcctgggcttggaaggcagaggggctgccatttcccttctcccgccctgcaggggagaggggtggggagtatggttatcttgccctggtcatatttgagctttcttccccgaccaggcaccctcacttagtagaaacaagagcagtcacccgtgccgtgtccacgatgacaactgctgcctgctcccccagcagaagaattgccccctccttactcaccccttcatatccctctggttttttgtcccctgtcttgtctgagctagctccctggtaggatgcaccttatgccacactagagacgcatggggagcgtttggttgaggggtccccagggagtgtctcctggttccgtccctcgcattctcctctgcctggagtaccaccagtagagttttgtcccagttgactgaagcttttgtgtctcagtgacacgcaagtttccccagtggagagggagagttttctaaggcatttctagtttggtgacaattagttttgtgtatgagtgtatgtattcattggggggagggggaaaggagtgttggcacaagcagagaaggcctttgtttctttaattgttcccaattaaacttcctgagggcctactgtgtgacagggccctggggatcagttaagaccttgggacacagtccaggaggaggagagagaacggttggattagccgctgtggggtttcattcattctgtctgggtggtctgagacatcatctttttctctgtctgccttttgttccttttgttctaagtgatacacacacggggcaaattcagaacactaaagatggtgtctctccctctaacctctccagaatccctggtcccctagctctcttccccagagacagcacctccattctgatgttctgtgcatgtacttttatatatggatgttatgtgtttaaaactattcaggccgggcatggtggctcacgcctgtaatcccagcactttgggaggctgaagtgggcagatcacctgcggtcaggagttcaagaccagcctggccaacatggtgaaaccccatctctcctaaaaatacaaaaatgagctgggcatggtggtgcatggctgtaatcccagctactcaggagcctgaggcaggggaattgcttgaatgcaggaggcggaggttgcggtgagccgagattgcggtagcactgcactccactccagcctgggcgacacagcgagactctgtctaaaacaaacaaacagacaaacaaaaaactattcatcttacacagatggtagtctggtctatgcattgctttttttccacgcttcatctccctgggagaccctaccaatgtaggtcttcctctatctttttcttggctgcatggtattcctctgtgtgggtgaatcctcctttactgttatggacgtggaggtgtttccaaaggtttctgtgtgaagcatgggaaggcatacgtccgcacatgttacagggaaatgagtacgcctgtgggatagactcctggaagtgggattgctagatcaagggccagtgatttgtcttttggtagctcttacggagcacctttgatgttgcacgttgcatctttttttatttttttgagacagaatcttgctgtgtcacccaggctggagtgcagtggcgccatcacttttcactgcagcattatccttcctgggctcaagtgagcctcgcatctcagcctccccagtagctgggactacaggtgcacgccaccacgcccagggagttttaatatttttggtaaagacgaggtctcactgtgttgcccaggctggtcttgaaatcctgttcaagcactcctcccgccttggcctcccaatgtgctgggattacaggcgtgagccaccgtgcccggcccctcatgctgcaccttgaagaaagttgttctctttctctcctcttcaatgtgatcccacctgtcgcccaggcagcatctccaggctgcacgtgtctttgcctcaggtgacctccttgtgtctgatgacctccttgcctcttcctcctgcttatggcctgcgtcatgtgcttgccacctggtgtggaggtcaggagcgtgggctctgggccctgcctgttggttctaatcccagttctgctatttgctggctgaatggctgtggacaggggacttgcttggggccttggttttcccctctattaagtgggttcatatcagtacctacttggtaaggctcttgtgagggtccccaaacacccataaagtgccaaggtagccttgtcagtcagtgtcggtgtcacctgtcattcttaggcagtttatttctcctggggactgtgacccccttaattggcaggtgttggatggaatgctggcttctctgcttaattgcagtgtgaccctgggcaagcaattcctttgcatggcctcagtttccttgtctataaaatgggcccatgatgcctccctcgtagggtctgctgtgaggctgaacgaagcaatgttctgccaagctgggcaggcagtcgctttcaggaactagcaaatgatgctgctgttgttttcactatgattactgttctcctgcgggactcatgctgactcctccgctctgaaaggtccccattgtcttcctgaaaggcacacaaggaacaatgttggcattctaaactgcatggcagcagagggcacgcagcaggctgctccggcatgaggcacacagggcttccctgtaccgtgcctcagtttccccaactggaagagtgggcatgagaggaaacccacctcaggcatgcttagtgttcagcacagtgcctggggtatagcaagcgcccaaaaaatgtgagtggctgtgattggaataattattattaagtagcagagtctcccataggattagatacccaagttgctatggcctttcccccaaaccctaggcaatcagtgttggcattttaaatggaaggcacagggctggcattggtggctcatgcctgtaatcccagcactttgggaggccaaggcaggcggatcacttgaggtcaggagttcgagaccagcctggccaacatggtgaagccctgtctctactaaaaatacaaaaaaattagccaggcgtggtggcgcatgcttgtaatcccagctactcaggaggctgaggcatgagaatcgcttgaaactgggaggcggaggttgcagtgagctgagatcgcacgattgcactccagccagggcgacagagcaagactctgtctcaaaaaaaaaaaaaggaagacaatgcccaaatacccactgggccacaatttcctcttctgtaacagagcttccccgctttgggtgttgtgacgcttcaatgagtgaagacttgggaagctttttaggataggacctggctctcaggaatgctcagtgaagcttcactttgattcttattatcttttatttttattaattttttttttttgagacaagaatctctctctgcgcccaggctggagtacagtggtgtgatcttggctcactgcaacctccgcctcccaggttcaagtgattcttatgtctcagcctcccgagtagctatggctacagatgtgggccacgacacccagctaattttgtatattttgtagagctggtgtttggccatgttggccaggctagtctcgaactcctggactcaagcaatccacccgcctcagcttcccaaagtgctgggattacaaacatgagccaccataccaggcctattatttttaaatattttattttattttatagagacaaggtcttgctatattgctcaggctggtctccaacttctgggctcaacagtcctccgactttggcctcccaaagtcctgggattataggcatgagcaactgcacctggccgtctttgtttattattattttgttttcttttttctttttttttgccatctagactcggcttggcagatttatttattgttattttaacttatattttttatttttttgagacaggctctcactgtgtcacccagactggagtgtagtggcgccatatcggctcactgcaacctccgcctcccaggctccagcagttctcgtgcctcagtctcccgagtagctggaattacaggtgcctgccaccacacacggctaattgttgtatttttagtagagaaggggtttcaccatgttggccaggctggtctcgaactcctgaactcaggtgatctgctcacctaggccccccaaagtgctgggattacaagcatgagctatgcacctggcctttttaactttttgttaaggaaattttaaagcactcaccgagagttgagaaaatagcacaaccacccctgtgtaaccatcaccagcttctgcaaaaattttctgctgatctgatcttttttttttggccattacctactgtgcacatatattttttcttttttgccaaggtattttaaagcaaattccagatatcatatcatttccattgtattattattgttattaatggtggtgttatttctgggatccagaatttgtttcagcacctccagagtctgtcctgttctatgaagaaagtggcattaggcccatttcataggttgggaaactgaggcagcagggagtgggctttgatcaggtggtcctttttctgtgatcccctttttgggactgtggtgaattccctgtcttggccacaccaagcctcaaaccctgtgggttgtttctgattacacaggtttgggggtcacacctgggtgcatgcagtgtggggtacaggttctgttactctgtgcagaaatcgtcctcataaaggaagagttgaagtggggctggcagcaggggatggacccctaggatgaccctggaggtgatgggcaactgggtcagctgtgtgggttaaagtcctgtttctgctccttctaaccctgtgacttggtggcaagctatttccctcctttagtccaggttagagaactggaagtacaggagagataataaatacttatttggatgaccttattgttaaataaggtctagcgtggaaaagatgttttgcaagtgcctggctcagagtaaacggtcactattgttagtgttgttattgcttctgtgtatactcttgaggttggggacaaaaatgctgtttctaggattgcagaggaagggttgatgccccttgaccccccagcccggccccgctaccttcattcccttgccatgcccaccctgtccctctgcactctccctttgaagtgcttgcctgtttagggggctgccaacttcagcgtggcccctctcagcctcttatgtcctctgtgtcccagcctggtaaccttgggaacggagtgagcgggaatatctgtctgaggctgtgagacccttgctaaagacccttggggtccttgagggagcgcctggtggcctctgctgcctggaggcagaggatggcccagtgtccagggacacctgcaggtgaagctccccggagccacctttccagaggctggatgccaactctcgtccaccgtgtgaggctgggcgggcagatgtccacagcgcctgcctcacagggtggctgtgacagttagctggactataacctccatcacctggcacgcatagtgtctcattgacctcagacacttggcgcccggcctgggtgcgggagttctccctgggagaagtctgagctcacagcttagcaagctcttgctgtactgcggaatttctctccctagaacgtgcgcggtgatctcctacttttgtgtgtatacttactctttcgtggacagtgtatatatatatgtatatatacatatatatatacacattttttttcccaaccccttttttttttccttttttttgtgtgtgtgtgtttgagatggggtctcgctgtttcgctctgtcccctaggccggagtgcagtggcactatctcggctcgttgcaacctccgcctcccgggttcaagacattctccctgcctcagccttccgagtagctgggattataggcgcccgccaccacgcccggttagtttttgtatttttagtagagatgaggtttcaccatgttggccaggctggtctcgaactcctgacctcaggtgatctgcctgctttggcttcccgaagtgctgggattacaggtgtgagccactggtcccagcctctcccaatcctttttcattgaagtgtaattcgtatacagtaaaatccgcagaggggccaggcacggtggctcacacctgtaatcccagcactttttgggagggcgaggtgggaggatcacttgaggccgggagtccgagaccagcctaggcaacataataagaccctatctctccaaaaaacaaataaagaccttagccagttgtggtggcccctgcctggatctaatctggaggctgaggtaggagaattgcttgagtccaggaggctgaggctgcagagagccattcattaaaatgcacatagtttaagcatgcctttccatgagtcctaacccctatcaagatacagcacattctcgtcactgccagaaagttgccctttgccccttcctggtcagtacctgctcccagaagcagtcactggcttgccttgtcattgtgggtcagccttgcctcttctagaatttcacagagggggagtcctgccccgtggagtccgttgggttgagcatcttcggctcagcatgatccttttgagatgcagggatgttggtgtgtgtgtatcgggagtgtcttcctttaagaaattctttcccgtgagtatttcttcaagcctggctttctcatgaggctccaaactgcagaagatgagaagggagggctgtgtttcctgtgttctcagctcctggtgtgcagtaggtgctctgtagatgcttgttgaatgaatggatgggtggatgacaggcatgtcccagggatggagaaaggggagcagagaccctgtctttggagttcctgtgtgtttctcaaaaagtgtcccactggccagggcgcagtggctcacacctctaatcccagcactttgggaggtcagggcaggtggatcacctgaggtcgggagtttgagaccagcttgggcaacatggtgaaaccccgtctctacaaaaaaatacaaaaagtagccgagcatggtggtgcatgcttgtagtcccagcaacttgggaagctgagaggtgggaggatcacttgagcccagaaggtcgaggctccagttagctgtgatcataccactgcactttagcttgggcgacagagtgagactgtctcaaaaaaaaaaaaaaaaaaaaaacaagaacaaaacccacatgcttccaaatgaccagggatgcttgtgaaaaatgaccatccctgggctccacacagaccaaactcctgggaatcccgatgagtggcgtccaggaaacagcattttcatcaagcgctgtctctgagtagttcttttgcacaggtagcccagccctaaatcctaggcctcttccggcagcagcagagctccccagcaggcctgtcatccagtcaaggcggccatgggtcttggagccccactcgatctctgtctacggccattgcttgtcctgaccctggctgcctccctggtgcctctgtgtgagcctggagtcctgtactcactccctaagtgctgttcaaagagggaatgaatgggaacctgggaggtaggtcaggattgttgacctccccactgctcagcggggaaaccgaggctccatgagttctggtgtttctcctgcagttcacctgggagtggaagccagacagggtatttcctgggctaagcagccatcagttgtaagatgcagcttccttttcagagacaaaagtgtgaaaaatgcgcatcttggagttgataaaactcaggaaaagtcctgtcccaccctgcagtttgcccgctgtctcaaggctgttttgtgcagggttgtctttttctgttaaatttctgtctcgttagccaaaggaacaaaatcccctgatgtcttcccagtgctttgtaccttctcaagcatgtccccttccatggtcctgcttttgtatttaaaattttttagtcttttttttttttttttttaaatgcgagatggaattttgctcttgttgcccaggctggagtgcaatggtgctatcttggctcactgcaacctccgcctcccaggttcaagcaattctcctgcctcagcctcctgagtagctgggattacgggcacatgccaccacacccggctgatttttgtatttttagtagagagggggtttcaccatgtcaggctggttttgaactcctgacctcagttgatcactggcgtccgcctcccaaagtgctgggattacaggcgtgagccactgcacccggcctgaattgagagacttctttaactcagtttctttttattttcaagatggagccttgctctgtcgcccaggctggagtgcaatagtgcgatcttggctcactgcaacctccacctcccaggttcaagcaattctcctgccttggcttctcaagtagctggtgttacaggcgtgcaccaccacccccagctaatttttgtactttatttttttttttttgagatgaagtctcactctgttgcctaagctggagtgcagtggtgcgattttggcccactgcaacctctacctcccgggttcaagcagttctcctgcctcagcctcccgagtagctgggactacaggcctgcaccaccatgcccagctaatttttgtatttttagtagagacaggtttcactatgttggccaggctggtctcgaactcctcaccttgtgatctgcccgccatggcctcccaaagtgctggaattacaggtgtgagccaccactcccggccatacttttttagtagagatggggtttcgccgccatgttggccaggctagtctcgaactcctgacctcaggtgatcctctcgccttggcctcccagagtgctgggattacaggcatgagccaccacgcctgagtgtaacttggtttctaacaaaagtctgcttaaaaatatgtaggagtgggccgggcgtggtggctcacgcctgtaatcccagcactttgggaggctgaggcgggcagatcacgaggtcaggagatcgagaccatcctggctaatgcggtgaaaccctgtctctactaaaaatacaaaaaattagctggacgtagtggctggcgcctgtagtcccagctactcgggagactgaggcaggagaatggtgtgaacccgggaggcggagcttgcagtgagccgagattgtgccactgcactccagcctgggtgacagagtgagactctgtctcaaaaaaaaaaaaaaaaaaaaaaaatttaggagtgggccgggtgcggtggctcatgcctgtaatcctagcactttgggagcccaaggtgggtggatcacgaggtcaggagttcaagaccagcctgggcaacatggtgaagccccatctctactaaaaatacaaaaattagctgggcatggtggcaggcacctgtaatcctagctactcaggaggctgaggcagagaattgtttgagcccaggaggcggaggttgcaatgagccgagatagtgccactgcactccagcctgggtgacagaacgagaggccatctcaaaaaaaaaaaagtgtgtgtgtgtgtactctcatatattagacattacataatacataatagaaatataaaactatacattattatatataaaaatatatactcctatttataaaattcccttttattttcattcccctccccgtcagcgacctcctgtgctggagtgaattgcttgctttgtgcgatggatttttgctttacagaaaggatactgcttctgtttctcctcctgctgcttttcctcccagtgctgtgtttagagggtcgccttgttggttacctgtccctccctgctgctcctccctgctgtgcgctccatgggctgcaggtagtacagttcacttcaaatcctcatgagggtcagacccccaggtgttcaccatctccctgtcacagaggcacagaggtaaaatgacttcccaaggtcacacagggagctgctgcctgagctgggattttcgtcctcctggttaattcagactcacactcaggcttcctactgcttggactgtggcccatgttctcacctccagcacaaatagccggtgctgtgccttcagggactggggagagcgatgaggcaggaacacacccattcccctgcaaagccagatcagtgtctgaggattgccagctgagcctggggaggtcaggcggggaggcatcagggtaggcttcctggaggagggagcttctagggcaggctttggggcttgggggtagggtaagaaaaacagggaatctagcatgatccaaggtcattgccctgagcagctgggtggaaggaagtgttctttctctctctctcttttttttttttttttgagactgagaccgagtttagttcttgttgcccaggctggagtgcagtggcgcgatcttggctcaccgcaacctctgccttcggcgttcaagagattctcgtgcctcagctccccgagtagctgggattacaggcacgcaccaccgcgcccggctaattttgtgtttttagtagcgtcggggtttctccatgttggccaggctggtcttgaactcccgacctcagatgatccgcccacctctgcctcccaaagtgctgggattacaggcgtgagccaacatgcccggcagattgtgactccctagtgccctcaggtaaaacctcttcagctccgtacaaagtctttctgatctggcctggcttatctcctacccttttcatcttgcctttcactcaccaagctggttcccgcctccccacctcggcctgcactgtactctgcccagagtcatcttcccctgctacaagcataccccagagagcaggcaggttaggttctagacagtgcagtaaagtgagtatcacaatagagcgagccacacacgttttttgattctccagtggatacaaaagttacgtttatacgatactgcaatctgttaagtgtgcaataacatcatgtctaaaaaaaccagtgtacataccttaattaaaaattgctttattgctaaaatatgctgatactgacatgaagtgagcttgtgactgggaaaatgatgcagatagactcactggacaaagggttgccagaaaccttcagttcgtaaaaaaatgctgtgtctttgaagtgtagtaacaagttatgcctgtacctcccactgccacgccctgacttttttttttttctttggaagatagggtctcattctgtcgcccaggctggaatgcagtggtgtgatcatactcactcctgtcttgacctcccaggctcaagcgttcctccaacctcagctacccgagtagttgggaccgcaggcatgtgccaccatacctggctgattttttaagtttttgcagagatgaggtttcactatgttgcccaggctggccttgaactcccgggctcaagtgatcctcctgactcagtctcccacagtgctgggattacagacatgagccactgcacctggctttttttttttttttttttttttttgagacagagtctcactctgttgcccagggtgaagtgcagtgacgtgatctcagctcactgcaacctccacctcctgggttcaagtagttctcctgcctcagcctcctgagtagctgggattacaggcgtgagccaccacgcccagctaatttttgtatttttagtagagatagggtttcaccatgttggccaggctggtctcgaactcctgacctccagtgatttgccctcctcagcctcccaaagtgttgagattacaggtgtgagccaccaacctggccttttttttttttttttaagagacagggtctcactggtgcccaggctggattgcggtggcgtgattgtggttcactgtggcctccaactcttttggggccacatctcgcaggtctctgcttaaatgctccctcctcggggaagccctctttgactttctcgtccaatttccttcacttcactgagcttatttccatgttaggtgacatcctcagggtctgacaaggactgaataaacccctaactgatactgaatgattgaggggccaggtgacctttatacagatcgtgaggagattgggttgggtttggattgggtttttgagtttctgagctgagttggaggcttaggagagaaaaggaaagaaggtgagggaaggttctggaagagcctggaggaggtggtactgggttgggctcagaagtgaagtttgctcacagtttgcgaagtggagagggtgtgaaggcagaggttgtgtgtacaattgggaaagcgttcaggaggccagcatggatgggctgagagacacaggaggagagggaggccgtggggctgtgtgggggccgggggcacggggagctggtagttagggagagctctggcagctgccttgctcgacatggagaggcgccttttgtttcttggcccctgggtcttatgagcaaatggtggttcttaatttggggtaagagggagctccagtccttttaggaatctgcttagaggccacagacttttccccagagaaacacacacttgactctgtatcccaaagtttggcaaaggggttcaggaggggtggggagccagttaagagctgttcacggatcgtgatggcaataaccatgataatcacagccagcacttaccttggctcgccccagcttggttctggtctaggccacttacaagcatcagctccttcactcacagaaggactggaggaggtaggtgcagggagcaccccgattttacacgagtaaactgaggcacagagcgattaagtgacttgcccagagcccgacagctgctaagtggcagagcccccactctcttccctggatggtctgcttcctggatggagcctgtttctgttttgttttgttttggagacagagtgagactctgtctcccaggctggagtgcagtagtgtgatcttggcttgctgcagccccgacctctcgatctcccaggctcaagcaatcttccttcctcagccgcccaagtagctgggactacagtcatgtgccaccatggcccgctaattttttggtttttttttttttttttttagagacagggtcttgccatgttgcccagggtggtcttgaactcctgggctcaggtgatctgcctgccttggcctcccaaagcagtgagattacaggcatgagctaccacgtccagctgcatcctgggttttttttttttttttttttctgagacagagtctcgctcggtcacctaggctggagtgcaatggcgtgatctcagctcactgcaacctccacctcccgggttcaagcaactctcctgcctcagcctctggagcagctgggattacaggcgcccaccaccacacccagctaatttttgtatttttagtagagatggggtttcaccatgtcagtcaggctcgtcttgaactcctgtcctcaagtgatccgcccgtcttggcctcccagagtgctgggattacaggcgtgagccaccgcgcttggtccaccctgggtttttattcatcaagcctcgctgcccccttggtacaggggccaagaccacagctgggaagctcctttcctcttgccccaagagccagcctgggttgctgctgagccattgcaggctgaggcacagcctctctttctccttttacgcttcctgatgtcttctttaacataatcatggccacctcagcttctttcagagagcaatatgttcctgagctagagacatgggtgaccagctggagtcaggatttggggggtgtggtgtaggtctagagccaactgtggcactggaacaaggcccctaccttgttcagcctcagtttccctaatcagctagagaggcctacttcctccttggaggttaaatagatgacattcataggtcaacggaaatgctgcatttatggcaataactgaccttgtaggtgtttcaaaattcaggccgtttcagaccagagtgcacacaggatgatgtgggaccccccagcaaggcaggcagctccccgtcagcacatatgctagcacttctgcgaagatttctgcagcaaatatatctgctgctgttgatactaagagggagatctaaggacagccattgcagttccactttgccccacaatgagccaggaaaaaagaaaaggatggctttagagatttttggaggttggaattgcagattagggggccacagacctaaaatgcctaccgagtaggatgagtgggttttttgtttgtttgttttgttttgttttgttttttgagacagagtcttgctctgttgcccaggctggagtgcagtggcacgatctcggctcactgcaacctccacctcccgggttcaagcgattcttctgcctcagcctcccaagtagctgggattacaggcgcatgccactatgtctggctaatttctgtatttttagtagagacgggatttcttcatgttggccaggctggtctcgaacccctgacctcgtgatccactcatgtcagctcctcgaagtggtgggattacaggtgtgagccaccgcgccgggccagggtgtggggtttaattgggatgatatgttgtggagtgactggcacatgacaacatgacaaggactttgtcattgctggttgctattactattgactgttgttgctattattattactaacccctcttcggtctgtatgggctggtgcagacacattgggctgtgatgcagatccacagttttctagacttgcacaccagttcctgggggatcctgttaccacgtgagttctgagtcagctggtgcagacactttgcatttcttaactcccaggtgaggctgctgtggtcaggggcctgccctctgagtagtaaggtgtccagtggttttccaggtgtttctgagttactttcaaggattctgcaaatggaggggaggcattggatgccagggtcaaaataagattccttagctcttagctttggggtttgccaatttgcagccaggtctgtgttaatcattacatatggaaaaaagtcatataacacgacgaaagtctttgcaccatctcctcttctttccttttccaaaggtgacctctgtggggagtttggggctcatggtctctctctgttgtccaggctggagtgcagtggcatgatcatagttcattgcagtctcaacatcctgggttcaggtgatccttccacctcagcctcctgagtagctggggctacaggcacatgccaccacacccagctaatttttgtatttttttttgtagacacagggttttgccatgttgcccaggctggtctcaaactcctgggctcaagtgatcctcctgcctcggcctcccaaagtactgggattacaggtgtgagccaccgcacctggccttaatcatttttaaatgtgcagttcagtagtgttaaatgtacttttattatgtaacagatctccagagctttttcatcttgcccaactgaaactttatttatttatttttttgagatgcagtctcgctgtgttgcccaggctggagtgcagtggcacaatctcggctcactgcaagctccgcttcccgggttcaaaccattctcctgcctcagcctcccaagtagctgagactacaggtgcccaccaccacgcccggctaattttttttgtgtttttagtagagacggggtttcaccgtgttagccaggatagtctcaatctcctgacctcatgatccacccgcctcggcctcccaaagtgctgggattacaggcgtgagccaccacacccggcgtccaactgaaactttatatgcattcaacaactccccccatccccagtccctagtagcctccattcaactttctgtctctatgaatttgactttaagtgccaaatttaagtggactcctgtagtatttgtcatactgtcactggcttatttcacttattgtattgtcctgaaggcttattcgtggtgtggcatgtgacaggatttctctcctctttaaggttgaataatattccgttgcatgaatagaccacattttgcctatccatttatctgtcgatgaacacatgagttgcttactcctcttggctattgcgaataatgctgctttgaacatgagtgtgcaaatatctattttttttgtgtggttttttttgagacggagtctcgctctgtcgcccaggctggagtacagtggtgcgatctcgactcactgcaacccctgcctcgcaggttcaagtgattcctctgcctcagcttcctgagtagctgggattacaggcacccaccaccatacccagctaatttttgtatttttaatagagatggggtttcgccatgttggccagcgtggtctctaactcctgacctcaggtgatccacccgctgtggcctcttctcaaaatgctgggattacaggcatgagccacggcgcccggccacccattttagctctttttaagtgtataattcagtggcattaagtactttaatattgtgtaactgtcaccattatccattaccagaaccttttcatcattccaaatagaaactctgtacctattaaagagtaactctctatcctcccttccctcagcacctcgttacctctattctactctctatatattggccaattctttttttttttttttttttgagatggagtctcactctgtcgcctaggctggagtgcagtggcgcaatctcggctcactgcaagctccgcctcctgggttcacgccattctcctgcctcagccttctgagtagctgggactataggcgtccgccaccacgcctggctaattttttttgctttttgttttttttttagtagagacggggtttcactttgttagccaggatggtctccatctcctgacctcgtgatctgcccgcttcggcctcccaaagtgctgggattacaggtgtgagccactgcgcccggcctatattggctaattctaggtacctcatgtaaatggaatcatccagtatttgtccttttgtgttgatttcactttacatgtcttcatggttcatccctgttgtagcatgtatcagaattcttttctttttttgtggctaagttcatcttccattggatggatagaccacatttggtttacctattctgccatcgatggacacttgggtcatgtcccctttttgctattgtgaacgacgttgctgtgaacataggctctaagtatctgtttgactttttgccttcagtttgtttgggtttatatctaggagtggaattgctgggttgtatggtaatgatctgttctaacttttggaggagcagtggctacatcatttcacatttccacctgcagtgcacgtggttccagtttctccacatccttgccaacacttgttgtagtcttttattttttttccccacacgaagttttcaaaatctggtgtgtattttacactcacagcacatctcagttgggactcgacatatttcaagtgctcaaatgtcacgtgaagctgctcatagtggaaagcacaagtttagttgatttatgtttttggggttttttttgagacagagtctgactcttttgcccattctggagtgcagtcatcaaggcttactgtaacgttgaactcctgggttcaagcgattctttcacctcagcctcctgatagctgggactacagatgtgcaccaccccatctggctaattttttattttattttatttttttgagactgagtcatactctgtcacccaggctggagtgcagtggcgcaatcttggctcactgcaacctccgcctcctgggttcaagcaatgctcctgcctcagccttctcagtagctgggattacaggcgcacgccaccacacccggctaatttttgtatttttagtaaagacagggtttcaccatattggtcaggctggtctcgaactcctgacctcaggtgatctgccctcctcagcctcccaaagatctgggattataggcatgagccaccacatccagcctaattttaaaaattttttgtagaggcaggaactcactatgttgcccaggttggtctcaaactcctggcctcaagtgatctttttgccttggcctcccaaagttccgggattacagatgtgagccaccgcactcggccgatttatgtttattataattattggtatggctggagggcagtggtatgatcccggctcatggcagcctctgcctcttgggttcaagcaattctcctgactcagcctcccaagtagctgggactacaggtgcacactaccacgcctggctaatttttgtatgcttagtagagacggggtttcgccatattggccaggctggtctcaaagtcgtgacctcaggtgatccacccgcttcaccctcccaaagtgctgggattagaggcatgagctactgcgcccggcctttccctgcttcttttaaatggaatattttagtgttccattttatctccgcttttagcctggtagcgctacctctttattgctctagagtttccattctctgtctttgactaggactttggctttgaatctgagtgagatgggagccatgggagggctttgagctggggagtgacccgacctgacatttttatatccataccttgggttgcttatgcaagagtgtttccaccggccagattcctggaaaaggaattgctgaggcaaaagggagcgagcatttagactttggtggccccgccaagttgcattccagaaaggcttcaccattttcactgctggcaaacagcagccggagcttttgagtggctgttccatgccaggcctgtgccggactctggggaccttggcaggagtcagcctggggctggctgcttcctaattctcagtcctcgagtcctacctccgatctcaagaaaaggtgaggatttcagagaggccataaaaaggagaagcaagagatgattgtgggtggctgaaggcggcctggcacatcccaggtgatgggagagctggctgcatccgatggtcccaccgcagggagcgtgaccaggaggtggagtgtattggactgggaaccgcacgtgtgggctcccatcactgtgtgccatgttggggtgcagttgaggggtcaaataatagtaccgccctcatgggacttgtttgggaggattcagtgagagagcagagagcacacagtcagaacttaaggatccgggttgtcatttgaccaaatgatcagcacggtgggaggggaccaccttcaggcacaggcccacccagcctagggaaaggcgtgactcaagttttggacagtgtttaaggcctgtgtcagaagaacttgggctcggatccccagctgtctccttctcaggcaagttctctgttagacgaggttaaatgacagcagagtctgcctcccgaagtggtgcaagggttcggctcagtgagatgatagcaccaaagagttcagtatccatcctgaaccacagtaagggttgataaagcttagcggctcttattaatattgctgtcattttgttgctgtcattaattttatttgattttatttcttttttttttttttttttttgagacagtctcactctgtcacccaggccggagtgtggtggtgcgatctcagctcactgcaacctccacctctaaaattcaagcagttttcctgcctcagcctccaagtagctgggattataggtgcccgccaccacgcccgactaatttttttatttttagtagagacggggtttcaccatgttggtcaggctggtcttgagctcctgacctcaagtgatccgcctgccttggcctcccaaagtgctgggatcacagacctaagccacaatgccccggcgtatttttccaagatgggatctccctatgttttccaggctggtcttgaactctgggctccagtattcctcccctcagcctcccaaagtactgtaattacagacgtgagccacctttcctggccagtcattattttaaatttaaggcctaataggcaacagccagacccttagtcttcctctaggactaaagccccagaggtgtggggcagttgctcagggtcaggaaataatagagtagagatgggaagccaggttcctctgacccagggtttccccatttctggagagcttccaggtttagggagcaaagtctcttctcctgttataatggacagtgaacaagacatgatatgaaaacaccaccaatggtattaatcatgctaatggtacctcacctgtagtgagtcatcgggtgacaagccctgacctgaagccaggctatttataacccgtctttattgagctccatctgaatattcatatgtttagctcagaaatattaagaatggattgctgggtgtctcagaacccgccgaggggcgttctgtgcgttcaccctgtccccctccaaagcctgaaaaacccctcatttcagaacacgtctcactccagaggtttccactaaaagatcgtggagccatgtgaatgtaaattccgtttccccctcttcatacatcccaggctgcatactgcacacaccgtttggcatctcccagccttgtgttttattgtatttaccactcagctctccagtccttgccagacgagtgagaatgagcagtggcgtcaggccttgacgggctctgcagggtgggcgggaggagtgggcagtgcggcttctggaacccattctctgaaggctcagagcctggagcccagagcgaggccatggctgggatgagggaggaagggggaaagacatcatggactaactcgggcctgccctcgacatgggatctgccttgtgggaccaggaggaggccatgttggctgtgcccactttggtgggaaccaggaaggaggccgagccttgaaagtggccaggtagaggaaggaattcagaaagagtgcgccagaaggggtttcactcactttctctcccccttgatcactggcacgctgtctgcagcctgtaccactttgcgaaactcactaggttgtcgagagacacctcagacttaatgtgttcaataccatgctcctgatacggttctcctccccaggaagaaacccataaaaaccaaaacaaacaaagcctgcttctctccatctcagtaaacggcaccatctcagtaaatggcagctccgagctcccacccacctgggccagatactttggtgccatcctcaactctcttctctctcttaaaattaaatttttttttttttttttttttttggagacagagtctcgctctgtcacccaggctggagtgcagtggcgcgatctcggctcactgcaagctctgcttcccgggtttacgccattctcctccctcagcctcctgagtagctgggactgcaggcacccgccaccatgcctggttaattttttgtatttttagtagagatggggtttcactgtgttagccaagatggtctcgatctcctgacctcgttatccgcccgccttggcctcccaaagtgctgggattacaggcgtgagccaccgctcctggccacatacgtaaagcttttagaataatgcctgatacatcaaaagcaacataaatgttagctgctgttattataattttattgtggtacaatatacataacataaaattgaaccatttttaagtatacagtttggtggcactaagtaccttcataatgttgtacaatcatcactactgtccatttctaggattttttttttttttttgagaccgggtctggctctgtcgcccaggctggagtgcagtggctggatcttggctcactgcaacctccgcctcctgggctcaagtgatcctcccacctcactctatcaagtaggcgggactacaggagcgtgccaccacatgtggctaattttttttttttactttttgtagagacagggtctcactatgttgcccaggctggtcttgaactcctgggctcaagctatccacctgccttggcctcccaaagtgctgggattgcaggcatgagccactgcacctgtttctatttctaggatttttttcaaacagaagctcgatacctgttgaacaataactctccattctccctggcccccagcccctgcaaaactcttctgctttctgtctcattgaattccctactctaggcacctcatctaagtggaatcatgtgatatttgtccctttgtgtctggtttattttatttaacacagtaaaggctcatacatgctatagcacatatcagaattcatccctttctaaggctgggtaatactccattgtgcagatataccacagtttgtttacccacttttctgctgaaatggataaacttggattgtttccaccttttaactacaagttgagcatcccctaatctaaaaatccaaaatgccccaaaatctgaaactttttgatcaccagcatgaagcctttgctttctgatggttcagtgtacacaaactttttcatgcgcaaaattattaaaattattttataacattaccttcagactatgtgtataaagtgtatatgaaacataaatgaattttatgtttatactcagttcccatccccaagacagctcattatgtatatgcaaatatttcaaaactcctacaaaatctgaaacctggagcacttctggtcccaattatttcaggttaagggatgctcaacctgtattattattttgagacagagcgttgctctgttgcccagtctggagtgcagtggtataatcatagctcactgcatccttgacctcctgggctcaagtgatccttcctcctcagcctcctgaggatctgggactacaggcatgtgccaccatgcccagctaatctttaaaatttttctgtagatttgggatcttgctttgttgcccaggttggtctccaactcttgagctcaagtgatcctcctgcctgggcctcccaaggtggtactgggattacagatgtgagctactgcgcccagcctgtattattaatattattgagatggagtctctgtcacccaggctggagttcagtggtgtgatctcagctcagtgcaacctctgcctctcaggttccagcgattctcctgcctccaccacctgagtggctaggattataggcgtgcaccaccacacccagctaatttttctatttttagtagagatggtatttcaccatgttggccaggctggacttgaattcctgacctcaggtgatcctccgatcttggcctcccaaagtgctgggattacaggcatgagccactgcacccagcctgtattactgtatttaatatgcaacctggcttctgaatttctccctgtaacctcacttcccactgagtcctcttcgttcactcacttcagccacaccaacctcttccttcaaggcaggcatgagtcttaccccagggcctttgaacttgttgttctcctgctgtggggccctccttcccctccttagtcaagcctgctcttatcaccctgtttaaaattgcaactcccttgcgcgtctctctcactgcttattcttcatagcacttcatttttgacatgccatctattttacattgattttattttattttattttatttatttatttttgggagggagtctcgctctgtcacccaggctggagtgcagtggtgcaatctcggctcactgaaagcttcacctcccgggttcacgccatcctcctgcctcagcctcccaagcagctgggactacaggcgcccgccaccacacccggctaattttttgtatttttagtagagacagggtttcaccatgttagccaggatggtctcagtctcttgaccttgtgatccacccacctcagcctcccaaagtgctgggaatacaggcgtgagccactgcgcccagcctgtttttattttttgagacagagtcttgctctgttgctcaggctggagtgcattggtgcaatctcagctcactacaacctctgcctgctgggttcaagtgattctcctgccttgttgagacacataattcacatatcataaaatccagccatgtaaagggtacaatgcagtggtttttagtatctccacagagttgtgcaacggtcatctctgtctagtttgagaacattttttctcaccctaaaaggaaacctcatacccactacgaagccactccccatcccctgctcctcccagccccagcagcctttatttcgcttcctgtctccatggatttgcctgttgtgggtaattcacataaacatgatcgtacactagccgatctttttgtgtctggtgtctttctctctgcgtcatgttttccaggtccaccgctgctgcggcgatgcctcattcctttttatggctgaataatattccactggatggatggaccggattttgttgatccattcatccgtggatggacattgggtccattcccctttggctattacagaagctgcttggtggctgtttctttagccaggtggaaggtggcatttccagcccctctctgcccggggctgctcttccactgtgctctctcggcacccacgggtctctgcctccctcctccctctattcctctcttccctcctcctcctgctctttctttgtgtatctccccctcccccagcctcagccaagagagagtgagtctggaagtaatttccagggagcccggggtaggccctgaggcagctctgctcccccctcagggaggcctcagcctgccctgaacactggccccaggggagggacagaagggacagcctgctgcttcttcagctcccgggaaggcatagggagagggccaagcctgggaaacagcttttctctgggctttaaaaattgtgtgcatttatttgatttttttggaatagggaacacatgctcaagtataaaactcagatggtaccaaggatttctagtgacaagtctcctccctcccccaactcccagccacctatacccacgtcctcttcccagaggcaacatggttaggatttttgggcctcctttcaaagagatgttctgtgcatgtgtaagcatctctgtcactcgctctctctgtttctctctctctctctgtcacacacacacacacacacacactttttaaggcaggtttgttttgttttgttttgtttttgagacggagtctcgctctgttgcccaggctggagtgcagtggtgcaatctcggctcactgcaacccccactccctggttcaagtgattctcctgcctcagcctcccaagtagctgggattacaggtggccgccaccatgcccggctagtatttgtattttcagtagaaacggggtttcaccatgttggccaggctggtctcgaactcctgatctcaagtgacttgcttgccctggcctcccaaagttctggtattataggctggagccaccatgccctgccaacagcaggttacattaataccattctggcctttgtttttccttttcaaaaatgttttaatgtttttgagacagggtctcgctctgtttcccagactggagtgcagtggtgtgatcacagctcactacaacctccacctcctgggctcaagtgatcctcccatctcagcctcctgagtagctgggactacaggtgtgcagcaccatacctgactaattttttttcatattttttgtagagatgaggtttcatcatgttgcccaggctggccttgaactcctgacctcaagcagtccacccctctctgcctcccaaagtgctgcgattataagtgtgagccatgatgccttgcaccccaccctgcatttttttttttttttttttttttttgagacagagtctcgctctgtctcccaggctggagtccagtggtgcgatcttggcttactgcaagctccacctcccgggttgacaccattcttctgcctcagcctcccgagtagctgggactacaggcgcccgctactacacaccaggctaattttttagtatttttagtagagacggggtttcaccgtgttagctaggatggtctcgatctcctgacctcgtgatcgcccgtcttggcctcccaaagtgctgggattacaggcgtgagccaccgcggccagccaattttttttttttttttttttttttttaagagacagggtttctctgtgtcgccctggttggagtacagtgtggcaccatcatgactcattgcaaccttgacctcctgggctcaaggaatcctcctgccttcagtctcctaagtcactgggactacaggtgtgcaccaccacgcccacctaatttaaaattttttttgtagagatggggtctagctatgatgcccaggctggtctcaaattcctggtctcaggcaaccctcccacctgggcctcccaaagtgttgagattacaggcgtgagccaccatgcccagcctgctgttctttctaacaacatatcaagaggctcttatttaccaggctcagcctctttcacagtggcatggtattccactggaaggccctaacctcttgggccagtcctgctttgccggacacctaggttagcttcactctgtcataaggctacattattgagcatctctgtgattcacatccaaaaatgagagtaacatttatccctttgttaacttatttgacagtaatttactgagctcctattgtattgtatacctggcagttttgggagtggggatgtgacatgaacaagtcaaagatccctggctgggcacaatggctcacgcctgtcatcccagcacattgggaggctgaggcaggcagatcacttgaggacaggagttcgagaccggcctggccaatgtggcaaaaatctctctactaaaaatagaaaaatcagccaggcatgatggtgtgtgcctgtaatcccagctactcgggaggctgaggcaggagaatcacttgaacctgggaggcggaggttgcagtgagccgagatcatgccactgcactccagtctgggagacagagtgagactgtctcaaaagaaaaaaaaaaaaaaaaaatccctgcctctggggagctgacctgccagtggaggatactcaaagttgggctcatcagactgtactgagtgctgtggaagaaaacagagggaatgggggcagagagggctggcggtgtgggtggtcattgtaaccggcccttgctgaaaaggtgacatttgaacaaagacctgaaggaggcgagggagcaagccccatcagtgtgaagccctgtcagggttcctagctgcaagaacagcaggtgcaaaggtcctgaggcagggatttgaaaacacttacccagtggcacagccagtaagtggtggagctggggtttgaactgggtagtctggagtcagagtcagattttttttttttttttttttttgagacagagtctcactctgtcacccaggctggagtgcagtgacatgatcttggctcactgcaacatccgcctcccgggttcaagcgattctcctacctcagcctcctgagtaagctgggactacaggcacccaccaccaccatgcctggctaatttttttttttttttttttttttgtatttttagtacagaccgggtttcactgtgttagccaggatggtctcggtctcctgaccttgtgatctgcctgcctcggcctcccaaagttctgggattacagacatcagccaccgcacctggccagttttttttagtaaactttacttaggtataatttatgtacagtgtgacacacccatttaaaaagtatcattggatgcaatttgataaatgtgtaccattattaaccatcatcacgatcaggatacagaatgtttctgttaccccaaaaggatcaataatgcccttttgtaatcaatcctccctaccccctggctcaggcaatgcaaaaatctctgctttctgtaactatagattcaacttgtgttttctaatcagcacattcagggagtgtgtgatgcctccagcttttttcttagaatctcacctgtggtcctagctacttgggaggctgagacgggacagtcgcttgagcccagcagttggagctatgatcatgccactgcactccagcctgggtgacagaccgacaccccatttcaaaaaatataaaataaaataaaaattcagctattcagggcagggtcttttgtggtttcataggaattttaggatttttttctattcctgtgaacaatgccattggaattttgatagtgattacattgaatctatagaccaatttgagtaatatatatatattttttccttgcaatattaagtattccaatccatgaacatgggatatctttccatttatttgtgtcttctgtaatttcttgcatccatgtatcatagttgtcagtgttcagatctttcacttccttggttaaatttaatttaatctttttgatggtattgtaaatgcgattgtttcttaagtccttttttggttaggttcgttgttagtgtgtagaaacaccactgatttttccatgttgattttgcaactttctgcaatttcaatttgtctgttctagagtttgacataaatagaatcacacagcatgtactcttttgtatcaggcttctgttgctcagcatagtgattttgaaattcatctatgttatgtgtaccagtagttcattccttcttttgctggcaatatgccattatgcagatataattttttcatccattcacctgctgatggacctttgggttatttccagtgtttggctgccatagatgatgctgcttgaacatgcctgtacgagtctttgtgtggacctatgctatcatttctcttgggcaaatacctagaagtggattagtagggtcagatgataagggtatgtttaattttgttagaaactgcccacctgggcgcagtggctcacacctgtagtcccagcactttgggagactgaggcgagaggactgcttgtgcccaggagtttgagatcagcctgggaacatggcaaaacccagtctctaccaaaaatacaaaaaaattagccaagcatggtggcacgcgcctgtagtcccagctactcgggaagctgaggcaggaggacctcttgagccctggaggtggaggttgcagtgagccaagatcatgctactgcactccagcctgggtgacaaagtgagaccctgtctcaaaaagaaaagaaaaaagaaaaagaaaaaagaaagaaagtgccaaatatttttcaaagcagttgtttaccaccagcaatggataagcattccagttgccccacatcttccccaccacttaccattatcagtctttataatgtcagacgttctaacgggtatgtagtaatatctcattatggttgtagttttaatttccctgatgactaaagatgttgaacattgcattgatttatgggctgtttgcataccttcttttgctcattttaaattggatcatttgttgtctcttttgagacggagtctcgctccaggctggagtgcagtggtgcaatcttggctcactgcaacctctgcctcctgggttcaagtgattctcctgcctcagccttctgagtagctgagattacaggcgccctccaccatgcccggctaatttttgtattttttgtaaagacaaggtttcgccatgttggccgagctggtcttgaactcctgacctcaagtgatctgcccacctcagccttccaaagtgctgggattacaggcatgaaccactgtgcctggtctggaattcttttaaacagccctttttctggatgctaaaaattgacctacaaaagtaactctgtaaccaacccaaatacatctggggccccggtgtgctgcccctgactgacaaagtgaaggctttgaatgtggctctttctgcatcctagcggctcagtccaggccctggaggggcatctgtcacctgggacactggcagcatccctggcatccagccatgaccatcccttctcacggcggggctgctcacggtgctgtccctggggtccctggcattaggctgtgatgaggtactggggacaccagcctcccactgggtggctgtggacagaagagctcagcagaagccacactgtctgactttgagcagcctgtaggttagctgagaaaacaaggcatacattttcatggttttgcttttctcgtggtggccctaacagttaacatcggttgtttgccatatcgggctctggactcacgaaatcctgaaatggccccggaagcatgggcaatgctgagaatatttaagcgtccagagccccaccagaacccaggctggctgcgagactaccacatgcgtgttcagctggaacaccactgacctgggggggttaattctgttccgatgtccattttgtagacctagaaactgaggaacagagagggaagtaacttgcttcaggttgcacagccaggaggcacagagcatgatatagagagacctttacctacattcaccaaccttttatttatttctttattttttgagacagagtcttgctctcttgcccaggctggagtgcagtggggggatcatggctcactgcagcctctacctgctgggctcaagggatccttccacctcagtctcccaagtggctaggactacaggtgtgcccatgatgcccagctaattatttcttcttctttttttttttgcagagacttaggtgcccaggttggtctcaaactcttagcccttagcctcaagtgattctcctgcctcaggctcccacggtgttgggattacaggtgtgagccactgcacctggcccagattcaccaacttttaatattttgccacatttcctttcttttattttctttgcttttccttttcttttctttctttctctctctccttccttgcttcctccctccctcccttcctccctccctccctccttcccctcccctttccctaccccttccccttcccctaccccttcaccttccttttttttctttctgatggaatctcactctgtcactcaggctggagtgcagtggcacactctcagctcactgcaacctctgcctcttgggttcaagcaaccctcctgcctcagcctccagagcagctgggattacaggcgcccgccactatgcccagataagttttgtatttttagtagagatgaggttttgctatgttggccaggctggtctcaaactcctggcctcaagtgatccgcctgccttggcctcccaaagtgctgggattccaggcgtgagccaccgcgcccggatttcattccatatgcttttatttctacaggccagtagagcaaaaggttttctgtctgcaggtctcagtttactcttaaggaaaatgaaccagtttcacctgaactctacacacacacacttcctctttctctctctgtcctgtgtttctcctaaacgatttgagagtaggaatgacacgaacgtgcatttccaaagaaccattctcttatgtaaccacaggacagttatcaaatgcaccttgttgaacattgattgatacaacaccattaatgcagccactctccgtattctggctctgtcagttctactaacgtccctcagagccgtatcctccccaccccgatgtaggatgaggtttggaatcacgccagttgcatttacttgtctggtctctttcagtcccttcattctggagggtttcctcagcctttctttgtgtttcatgacgttgacattttagaagggtccaggccagttattgtgtagaacgtctctcattttcagtttgttggatgtttcctctcagtgagatccaggctacgcatcgctggttggaatttccagagcctgtgttcttaaccaccctgaggttctgcctttgaaagggacattctggttcctttccaaagggctggtcatcatcttgtccttgttctggcaggtggtgcgttcagctggacaacccgctgcattcataatattggggtcatataatttcaagaaaaggttaaagaaaaatggtctcttaacatgaaaaggtcatagaggatcattagaaggagcaaaagaggaaaggggagggagcaaaaaagaaactggaatatacaaagttccaaaaacgcagataacacaaaagtagcttgtaatcctgtcactcctggggtagagcaagtatgttaatgtttgggcatatttccttctgatcttccttctgattggctcttcctcttgccctcaggcattcagtttgcacagttgacaggagagacatattttgagagctgaagactgagattccaggtgcagtggctcacgcctgtaatcccagcactttgggaggctgaggcaggcagattgcttgaggccaggagttcaagaccagcctgagcaacagagtgagaccccgcctctacaaaaaattaaaaaagttagccaggcgtggtggcatgcgcctgtaggcccagctatactggaggccaaagcaggaggatctcttgagcccaggaagttgaggctgcagtgagccatgattgtgccactgcactgtagcctggttgacagagtgagaccctgtctccaaaaaaagaaaaacgtagaaagaaaaaagaaaactcagggcaggggggcgtcagccagggaggtgcattttgggatctggcagggggtggaggaggggtacgtccagcatgcggaatgctctgcccactgagggcttgtgtccccagacctgggatttctgcctcacagtgtggacaccagggtcctcaggggagcagagatgggtccctgctggaaacttccctatgtctccagagcgcctgcaaaaatctccagaaatcgccagcccctcgtgagtttggagtggaggcttttaatcaagtccaagggatcagctcagcccgacacacatgcacacagacacacgtgtgcgcgcacacacacacggctgaaacaccatgcttaagaacatttctcccatgtgttttactttttgagccttagcccggggatttgagaataacagctattcctgagagtacttcccgagcacatcctgggagctcaggtcacgcacttcacccgtattaattcgtttaatcctcctgacagtcccttgaaggtgagactgttactatcagaaatggaaattgagacacagcgaggtgaagtaagtcaaggattcctacagaaaagtgtaaaatatgctcatttcatccagcaattataaagtaacactctcacacacagttattccttttttttaacagctttattgagatataattcacataccatacagttcacccatgtaaatcgttcaccacagtttatagtgtgtttgcagagttataaccatcaccataatctattatagaacattttcctcacctcaaaaagaaactctgcatcccttagccatcatccccactccttctccccctcccagcctccagcaaccacaagtctactttctggctctgtgaatttgcctattttggacatttcgtggaaacagactcttacacgacgtggccttttgtgcctggcttctttcactcagcgtgatgttgtcaaggtccctccgtgtgtgtcagtgtctcatcccttttcatggctcagtaatactccattgtatggataggccacattttgtttatccgttcagttggtggacattggaggttttttttttccagtttgcactgttctgaatgatgccgtatgaatgtttgtgtgcaggcttttgtgtggacacttgtttccatttctcctggtttctacatgggagtggaattggtgggtcacagggtaactgtgtgttaacctactgagaccagccagactcttccacggcagcggcacccttgtatatcgcccagcaatgcatgagggctctgatttctctatcattttgatgattcatccattgtcctgttgataggatctgggttgtttcagtttaggggtgctatgaacattctagaatgtgttttgcggtccacctctgccccgctatgcataaagttgggattccatagacagtaggtcctgttaggtaacaggaaaaatgatctgtgggctcctctctctccttggcacgtgtgtgtggcccacgttgcatgttcttgtagaatcctccttcccgggtgaggattggaagccatgatcgcctgcctctgttgctggttttagtctttaacccttgctctgtggacttgagaaatgtgcttttccatggtgcctgtgaccaagatgtccgcatcgttagtgaagaccctgctatgtccttgaccacactgcacggggatcctgtccacgatggggggtgtcctgttgggcttgagtgtctagatatggagaccgtagttcgcggggggagtggggggccgtttggcatatttgccctggcatttggggttgtttattgggggtgggagtgctcctggcatttcctgggcgggaactactggtgtagacctactggattaacttgctcctgggtcggtgtgcgggatagggggagggtgcatcagtctttgtggagcgtctgccttctctccgtctccctgttttcctgttaccgtctccccgtccctctctctgtctctctgaactgctcgttccctccttgccttctgtgccgatgcccagttgaactgcccatccctatagattgggcgtctctgagcccgcagtggctgcctgagctgtaacccaccccgtgccctttcacctcctctcccgcctccagctgaccaatccctggggtttctggtcggcctgtggatgtgtcccggtcaggcctaggtcaggcgcctgacagcgtcacctgtggccactgagaatcatcctccttcaggagtcccagtcagtcaatatttacacaaagcgaacaaaaagaaacctggagctcaccactcttgggggagccaggcaggagctaagataagtcccatttatggcctgtcagatagcgatcggcacctgcagtaaagcaagcaggagagggactgggggagggcttgtgactacagacggccctggtgacactcgagaaaaggaagggcatggctgggagtggtgactcatgcctgtaatcccagcactttgggaggctgaggtggtggatcacctgaggtcaggagttttttttttttgtttgtttttttttttttgagacagagtcttgctctgccacccaggctggagtgtagtaggctgatcttggctcactgcagcctctgcctcctgagttcaagtgagccctgggctctcctccctcagccccctgagtagctgggactacaggcgtgcaccaccacgctgggctatttttttttttttttttgaggcggagtctcactttgtttcccaggctggagtgcagtggcacgatcttggctcactgcaagctccgcctcctgggctcacgccattctcctgcctcagcctcacaagtagctgggactacaggcacccaccaccacacctggctaattttttgtatttttagtacagacggggtttcaccatgttagctatgatggtctcaatctcctgaccttgtgatctgcctgcctcggcatcccaaagtgctgggattacaggcgtgagccactgcacccggcctaatttttgtatttttagtagaaatggggattctccatgttggccaggctggtctcaagctcctgacctcaagtgatccacctgccttggcctcccaaaggctcggattacaggcatgagccactgtgcctggcctgtatgttattaatattattgttaatcttttcatttatttgtgagcgctgttatatgccctctgtatcttttgtgaggattaatttagttaaaagttgatctcataatatataagtcaacacaatcagaaattcaaacaggaacgtattgacaagcaaaggaatgttactgtctctgcctcgaagatcttgtgtcctgcctggagacacttcacttccccactcacctgccactgtctgctcagtgtcaatgtattgattacctgtccaacagaatctattttatctctgaggttagggaattagtagaaattgatatcctactaatggaatagaacagagagtccagaaggagaaccaggcacattaagacatggtatgaggtcgatatggccaatggtcagatttgtggggaaacaagggactcataataaatagaggtagggatcaaaagtaaaaaggtcatccacaggtggaaggagatgaaatcagatccctacctcacactgtacagcaaagccaaccccaagattattgagtactcaaagtcaaatataaacttggaagctgcttagactttggggtagggacagattctgaaatgagatttaggttagtgtaaaagtaattagattttttgccattaagtgcaaaagtaattgcagtttttgccattactttttttttttgagacagagtctctgtcgcccgaactggagtacagtggcacaatatcagctcactgccacctccacctccagggctcaaatgattatcctgcctcagcttcctgagtagctgggatttacaggtgcatgccaccatgcctggctaatttttttgtttgtttgtttgtttgttttttgaggtggagtcttgctctgtcacctaggatggagtgcagtggtgcaatctcggctcactgcaaccctccaccacccagggtcaagtgattttcctgcctcagccttccgagtagctgggattacaggcacctgccaccaccccggctaattttttgtatttttcatagagacagggtttcactatgttggccagactagtctcaaactcccgacctcgtgatcctcccgccttggcctcccaaattacagggctgagccacggcacctggccaatttttgtattcttagtagagacaggatttcaccatgttgactaggctggtctcgaactcctgacctcaagtgattctcccaccttggcttcccaaagtgctgggattagaggtgtgagccactgtgcccggccagtttttgccattacttttaatggcaaaaggtgcaatgatttttgcaccaacccaatataaaaggtgttgctctgagagggaggtgtggagttcttgcccatagctgccacttcagtatttctccttctctgaggctctgggcagccctccctgctgtgccctggattggggtcatctcttctcttaataaggtgatcagtagctttgggaccagcagaatgcattagagggaaatgggcttcactgaagagggcagtggatgagaggaaggagcatgtgtgagggcttgtgtgcaccacacatcctgacaccatccgcccagcccgcacagcctgacaccatctgcccggtccacccatcttgacaccatctgcctggcccacccggccttctcaaatgctggagggctcttggctctgctgttcccttacactccttggccaatccatctgcaaaccctcttgctctgctattatgtccagaatttgactgcgccttgtcccctccgctgtcaccatgtctcctgcctggaccattaccgtcgccccctctctgtgcttccgtcctcaccttctgcagtccgttctccactctacagccagaaggaacctgtgaacacccaagtcaggtcatgtccctgccctgtccggagccctccctcagccctgggctcacctggaataaaagctgaagtcctcgccctcgttgtctgtctgacctcgcctctcctgcatgcctactcatgctcacgccctcatcactgcccgtggtccctgaggcgcccacgtgattctgcctcaggaccattgcatgtcctcctccttctgcctggagcccgctctcctggggtggccacattgctgctccccttacctcctgcacatcctgtatgtaccccagccctccccaacccattcttggcatccttgccctcatcttctcctcgggacgctgtctcttggttcagggtctgactcctgccggtagaacgtgagctctgggagagcagggatgacttcctcactcccagcaccatcgggaaagcgtttgacttctctttgtggagcagtagggatcagtagggagccctaagaaggggaacagcacgatcttaaataaaataggtcgctctggccaccaagtggggaactgagtttagaagtgggaggtcagttagaagtccctgccaccctccaggcaacgagcacgagagggttgggcagacaatgctggttccaagacctagagaagggtgggctggagttatttaagagacaggaggaatggtggcatctttgagccaaccagcgttggctgattcccacagatggcgccactcctggctgtgatgtggctgcaaacccacggcttgcccgggacctgctctgggacaggaacgtttgaaccgcaccaggtcagcatctgaaggtgtttgctgtaagacccaggcctgtgactctgccagcccaaacccctgccaggtcctgggcagatgtcggcctgctgtcacttctctggactctaaggcttttttgcctgtgtggcatgtgagaaaaataggggagtgattaggaaggctcatgcagaatccaggtaaaaaactatttcaggtatggaagggtggaggggaggaaggtcatctggagtattttttttgagacaaggtcacccaggctggagtgcaatcgtgtgaccatggctcactgcagcctcgacctcccaggctcaagcaatcctcctacctcagcctcctgagtagttgcaatcagaggcatgtgccaccacacccagctatttttttaaaaaattttttagagaacagggtctcactatgctgcccaggctggtctcaaactcctgggcccaagtgatcctgctctcttggctcccaaagtgctgggattacaggtgtgagccactgtgcccggcctgtccagactctgtatagacatcagcagtcaggcagtgtggcatcttggaaagcagccaaggctttggtgtccaagaatcccaggttctaatctcattgcttcctcttactactcgtggctttttagcttgtgtgcattcggctgcaagtaacagttgacttgaccactgatggcttaaatactctcttatttttttcaacaaatatttctaaatttagtttttgagatggctaattcaccaagctgaaaaagcaaaaattattttgaaaactatgcagtggaacacctcctattcctgttccgatctgccaggtcccttcatagttagtcattgtgtttagtgtcatatacacccttcctgaagttctttaggcattgaaaagcattcagaatatgtatcatgtctccttcacccttttcttaagcagatggtaacgttttacacacacccttctacattttacttttccatgtagcagtagtctgggcgatctttccctatcagtacacaaagaacgtcctcattctttttttttttttttttttttttccgagacagggtctcgcgccgtccgccaggctggagtgcagtgttatgttctcagctcactgcaacctccaccttcactggctcaagcgatcctccgacctcagactccagagtagctgggattacaggtgctcaccaccacacctggctaatttttgtattttagtagagatggggtttcatcatgttggccaggctggtctcaaactcctgacctcaagtgatccgcctgcctcggcctcccaaagtgctgggattataggcatgagccactgtgcctggcctcattctatttttttttttttcaaggacatctttactgacatattcacataccataaaatccacccatctaaagtgtaccaattcagttgttttcagtatattcacagagttgtgcagacatcaccacaatccattttagaacattttcatcatctcaaaaagaagccgtactcatgagcagccgctttgaatttctccctccccgcagtccttagcaaccacgcatctactttcggtctctctgggtttgcctattctggacattttgcataaatggaatcatggaatatatggcctttgtgcctggctcccttcacttggtgtcatgcgttccaggttcatgcatgttggagcgtgtgccagtgttccttccttcttatggcggagtaatagtctgtgatatggatacaccacatctgtttatccgttcatccacggacgggcatttgggttctaccttttgcttcttgcaagtaaaggtgctgcggatgttcacaggccagcctttgttttgttttgtttttttgaaactgagtttcgctcttgttgcccaggctggagtgcagtggcgcaatctcagctcactgcaacctgtgcctcccaggttcaagtgactctcctgcctcaggctcccgagtagctggtattacaagcgtgagccaccgcacccagccttgggccagtttttgtgtggacatatgttttcgactctcttgggtctataagtaggagtggaattgctgggccacgtggcaactctatgtttaacttttggaggaactgccaggcgggtttccacagcagctgcaaccttttacagtcctaccgacagtgagtgagcattcgtgttccgccacaccctcacgaacacttgcccttgtctgtctctttgatttgagctatcctaatggatgcgaaatggtatcctctggttctgatgtgcacttccctggtggctaatgatgttgagtatcttgtcatggccatttgtatacctctttcttttttgtacagctgcatactattcccctgtttagagaaactgtagttgatttaacctgtttactactgcaatagtcctgcccaagaaattaaaaaaaaaaaatcaacctgtttactactgatggccagtgggttgttcccagtatcttgctattattattattattattttttgagacggagtctcgttctgtcacccaggctggagtgcagtggcacgatctcagctcactgcaagctttgcctcctggtttcacgccattctcctgcctcagcctcccgagtagctgggactaaagacacctgctaccgtcttgctattattaatagaaacataactgtaaggccagggcatggtggcttatgcctgtaatcccagcactttgggaggctgaggtgggaagattacttgagcccaggaattcaagaccagcctgggcaacatagcaagactccatctctatgaaaaaaaaaaaaaaaatcacaaaacaacacacctgtaaaagcccctaactgtataattttggtcgtgtcaatggtacctgcaggatatgttcccataagtgaagtagccaggcagagggtgaatgcgtcttgatcttagtgggtattgtcatgtgcagggggtcctcattattccaagatatcatatttgcagatttcatctaatcgccaacgcttactcataaccccaaaatcaataacgcacaatgcttttcccatcatttatggacactcacagaatagcaaaaaatttgagtcacctggtgcacacatctccagctgcagtcaagcaacgccacaccctgctttcttattctcttactataaacaagtgtcctttttgtggtctagttagtgccatgttttctatatttttgtgctttgtgattttgctgtttaaaatgtccccagtttggccaggcgtggtggctctcacctgtaatcccagcactttgggaggccgaagcaggtggatcacctgagatcaggagttcgagaccagcctggccaacatggtgaaaccctgggtctactaaaaatacaaaattagccgggcgtggtggtgcatgcctttagttccagatacttgggaggtggaggcaggagattcgcttgaacctgggaggtggaggttgcagtgagcaaagatcacaccactgtactccagcctgggcaacaagagcaaaactctgtctcaaaaaaaaaaaaaaaaaaaaaaattagtaaaatgtccccggtttaggacaggtgcagtggctcatgcctgtaatcccagcactttgggaggctgaggcgggtgaatcacctgaggtcaggagttcgagaccagcctggccaacacggtgaaaccccatctctactaaaaatacaaaaaaaatgagctgggcttggtggcgggcacctgtaatcccagctactcgggaggctgaggcaggagaatcccttgaacctgggaggtggaggttgcagtgagccgagatcgctgcactgcactccagtctgggtgacagagcgagactccatctcaaaaaaaaaataaaaataaaaataaaaataaaaacgtccccagtttagtgctgaagtgccgtctaatgtttctaagctcaagaaagctataatgtgaggctgggcatggtagctcacgcctgtaaccccagcactttgggaggccaaggtgggagaatcgcttgaacccaggaggtcgagaccagcctggggaacatggtgagatcctgtctcgacacacacacacacacacacacacacacacacacacacacactctgaataaataagtaaattttagaattagccaagcgtgatggcgcacacctaaggaggaccacatgagcctggaaggtcaaggctgccatgagttcttttcacaccactgcaccccagcctgggcaacagtgagaccctgtctcaaaaaaacaacgagaaggctgtgacgtgcctttcagagaaaatacacgtattagagaaactgcattcaggcacaagttagggtgctgctgacgtgaggctcagtgttaatgaatcaaaactatacattaaataaggtgtcttcgaacagaaacacacataagccaaggttttatattggttggtgaaagcattgtggccagaggctttcaggaacctaactttgtatttcccccaggagacatggttaatgtctaagtatttgctaatccaatgttcacagtcactttttagattctgtaatatatagaacacagccacctggaataacgatcaattgcacaggggttttttttctacatgctaggggtgctttactgggttctaatttatgtgcagtaaaatgcacaaaactgaagcgcgcagcttgatgttttctgacaaatattacctgtgtaagcatcactcagctctagctagagaacacgtccatcatctgagcaggctcccttatagcctttcccagtcattcctgcatccctcccttgaagcggccacacgtctgatatttttcccccactataaatcagttctggatattgtagatttgtttggttttttttttaagatggagtcttgctctgtcgcccaggctggagtgcagtgtggcgatctcggctcactgcaacctccacctcccgggttcaagaaattctcctgcctcagcctcccgagtagctgggactacaggtgcccaccaccacgcccagctaattttttgtatttttagtagagacagggtttcactgtgttagccaggatggtctcgatctcccaacctagtgatctgcctgccttggcctcccaaagtgctgggattacaggcgtgagccactgcgccgggcccatgttctagatctttacacaaatggactcacacagtgtgtagacttttgtgccaggcttcctttgctcagcatgatccatttaagacccatttgtattgttgctgtagaagtccttcattcccttttactgccaaactgtattctgtcgtgtggatgtaacagtgtattcatttacctgttgatggctttctgtgccatttacagttaggggcttttatgaataaggctgctgtgaaatttttttttttttttgagacggagtcttgctctgtcgcccaggctggagtgcagtggcatgatttcggctcactgcaagctccgcctcacaggttcatggcattctcctgcctcagcctcccaagtagctgggactacaggtacccaccaccactcccggctaatattttgtatttttagtaaagacggagtttcactgtgttagccaggatggtctcgatctcctgaccttgtgatccgcccacctcggcctcccaaagtgctgggattacaggcatgagccaccatgcccggctgctgtgaaaatttttgtacaggtgcttttgtggacatacttttcacctcccttgagtaaataccttggcgtgacattgttgggtcatagagttggtatatatttaactttacttaatccaggctttaattctcttctgggacaagatgtctaggagaaggccattccagggatgtttggcagctgaggattgtcaggccagtaggtcagtgtccctcttatactctctctctctcgttttttttttccctgagtctgttttgctagggaacctctgattctcttgaccttcccctcaggaatgcataatggctgctgcggcaccagtcattgtcattatattcatagcagtctttcaagcaaaaaggagagggagcaaacagtcttcccaagacaagattctgcctctttagccaaatgtgaaaactttcccatatccattctgagctgcaagggagtctgaggaagaaagtttctggccaaggagcaggggtctgcactcactatggtctgtcctctgttgaccaggatgttggggctggaagtgtttgtcagaccctgggcaacttctaaattagccttcctgagcctcagagaagactcggtgggaccacttggtcaggggcctggaccttgaccaggaactggtggcttgtgtttgatacaagaacaagaaccccagaaggaaaactaaagagacagaagcttctaggccgggcatggtggctcatgcctgtaatcccaacactttgggaggctgaggtgggcagatgacttgaggtcaggagttcgccaggcgtggtggcgagtgcctataatcccagttactcctgaggctaaggcgggaggattgcttgaaccggggaggcagagtttgcagtgagctgaaatcatgccactgcgctccagcctgggtgacagaatgagacttcgtctcaaaaaaaaaaaaaaaaaaaaaagcagcagcagcttctagaacagtggttcgcagagtgtggtctgtgccagcagcatcagcatcacctgggaactcattagaaatgcagagtctcaggccgcaccgggacctgccgattcccagattctcaaatctgtattaggaaccagtggtctacaaacccgtgcgcacgtcttggggaacgtttgttttcccctttgcttcccttagctgcatttttttcccctgaattcgaagcctgcttcgttgcctgatgacgtgtgagtccctgtgtccggtgaacataatcatttcttttgtatttccgccacccaccccgaatgcctgtactttaccctctcccagggtttttcctgtttctcataagccagcattgagaaaaatccaaacccttttgagatacctggttttcttggcaagactgcagctttatagctgtatttagaacagcgtcgaatggtgaaaagggaaaagagaagatgcataaaacatttctagtttgtaactacctgtataaaataggcttttaagagccagacatcagtcgctttatgagcaatctaagctttatggggcccactttatttggttaaactaattcaatgattttagagatctaaaggtcactaaaaataaagatggtgtagattttaattgctcttcaaattgctctttctctgtctttcccaacaggggtggaggtgggtgaagaatcaacatttttttccctgttttccttttctagctttaaaatagacacatcatgcaagcggctacatatccagggcccagccagctcttacggggctttttcatgcaattgaaaatggtgctttgtccgagagggcatgactctgtggtgtgtcctttgtatgaattgggaaaggggactcctttctccatgtggatgccacccttctctggggctcataggtgtgagcagaacctggactggatttgatgccccacttgcccctttgtctggattcctttgtgcagtgaacaacctgtgcagctgtacatggtggtgcatacacacacacacacacacacacacacacacacacacacacacacacacgttctcttctcttctctctttctttttcttttttgagacagggtctccctctgtcacccaggctgtggtgcagtggcatgatcttggctcaccacagccttagcctcccaggctcaagcaatcctcacacctcagcttcccaagtagctgggaccacaggtgcacactagcatacctggctaatttgtaaaattttttgtagagatggggtctcactgtgttgcccaggctacatatatatcttctatactctgtacgtattgtatgcgtctctgtcttagaaacttacatgtacattagtttcccattgtcgctgtaacaaataccacagatgcaggatcttaaaacagaaaactattctcgtatagttccagaggccctaagtccaaaatgagggtgttagcagggccactggggttgtcagagctgtgctccctcaggaggctctagggaagagcctagagccttcttcgcctggtccagcccccggagctctaggtggtccttggctcgtagccacgtgacattaagctttgcctccttcttcacatggccttctgttcttctgtgacttctcctttgctgttaagaggacatttatcataggattttgagcctacccagataatccaggacagtctcatctcaacattgttaatctaattatgtctacaaagacccttttttccaaataaggatggccacatccacaggttctgggatgtttacatattttttgtggtgggagccaccattcaactcactacaaaggccttggaaatacatcctaagagcttaacttctaggcgtcatagcatgttaagtccacgtaccaggtgaacacatcacctcatttgtctgtctgaccaaggttcacgggaatgactcattcgaggcatttcaggacaactaaagggatagaggacctggccgggtgagtggcagaggtggggaacctgttgtagtacacccctgctgtggggggtggagggagagatggccaggctggcatcatcatgtagttcccacgggcttaggagtctcagctgggttcaaatcctggctcttgggtgaccttgggcaagtacccaaccctttttggcctcagtctcctcatttgtgtaatgggcatgaggataatggcatctgccttatagtgttgctgtgagaatgaaatgataagatgaagcactttgccgggcgtggtggctcacgcctctaatcccagcactttgggaggctgacgcgggcagatcacgaggtcaagagattgagactatcctggctaacacagtgaaaccccgtctctactaaaaatacaaaaacaaaaaattagctgggcgtggttgtggcgcctgtagtgccagctactcaggaggctgaggctggagaatggcgtgaacccgggaggcagaggttgcagtgagctgaaatcacgccactgcacaccagcctgggtgactgagcgagactccgtctcaaaaaaaaaaaaaaaagacgaagtacttagtaagcattcagcaaccttggctggggtgacgaagatgatgaagtcagaggtggccgtagccaagggctcatgggacagaatctgacccatcaaatgcccagactcccaaacaccagggctcatagccacgtggcccaggcagaggttggactcgtagttggggcaggtccagtcggtggccagcgaggaagggggttcgcggggaggagcagaggccagagggagccgggccggggaggagggctttctatggtcgtttacacatggcatctcggtgtccagtgtggggcaggcatataggaggagctgaggctgcttgggcagcatttatttaccaatcggtaggtcagcttttgagtattttaatggcaggagcagccagatgtcaataagccaaatgtgaacccaggcttggtgatgagaaaatacatttactacatttgggccagaatagtggtcatggacaggagggcactgactggagagatatgggaggtgggatggataaaacttggatgagtcagatgtggggtcaaacttggttcctaagtccccagagagagctgtatcagtgagctgtcactacataacacacagccctggctgggcacagtggctcatgtctgtaatcccagcactttgggaggtcaagatgggaggatcgcttgagcccaggcatttgagacctgcctgggcaacatagtgggaccccgtctctgcaaagaattaaccaggtgtggtggcgtgcgcctatagtcccagctcttcaggaaactaaggtgggaggatccctggagcccaggaagtcaaggctgcagtgagctgtgattacaccactgcagtccatcctggccaacagagcgagaccctgtctcagaaaatcaaaataataataaacagaaaaaagaaaaccatgatcccaacggttagaatttggactgggcgtagctaggtgcttctggcctgggctgggtgtctgtagtcagctgttggacagctggtgactgcgtctagggcttggctggctgttagctggggtgatggggtgatgggcacgtggctctcatcctcttgcaggccagcctgggcttcttcacctggcagctgggcaaagactggaagtgtgccaggctcagaatcacacaccatcggccaggctccttggctcatgcctgtaatcccagcactttgggaggccgaggcgggcagatcacgaggtcagttcaagaccagcctgaccaacatggtgaaaccccgtctctactaaaaatacaaaaattagccgggtgtggtggcacgcacctgtaatcccagctactcaggaggctgaggcaggagaatcgcttgaacccgggaggtggaggttgcagtgagccgagatcatgccactgcactccagcctgggcaacaagagcaagactccatctcaaaaaaagaatcacacaccatcactttcaccacattctgttggccaaagcaagtcaagaagccagcccagggtcaagggctgaagtcatagaccccacttcttaataggaggagctgcaaagagtgtgggacgagggaggagaatttctggccactttgcaatcaaccacagtggcctttgtttcagatcccctttccaccagccctctcacattttgtttgacctctcttcttaatcagtgacccacaaagaacagcccttgacccatgtgagaggccttgccatgggttgcaaagaaaatccagaaatgggagctctttttgcgtcaggttgtatttgtctgcaaataatgggaaaccacatagtggcttaaaccataaggattaacaagtttggaggcgggcagcccatgaagagttatgaagagtacagtcaggccggcgcgatggctcacgcctgaaatcccagcactttgggaggctgaggcgggtggatcactagaggtcaggagttcaagaccagcctggctaacgtggtgaaccctgtctctactaaaaatacaaaaattagccgggtgtggtggcacgtgcctctaatcccagctactcaggaggctgaggcaggagtcacttgaacctgggaggcggaggttgcagtgagtcaagattgcgccactgcactccagcctgggtgacagagcgagactccgtctcaaaagaaaaaaaagaacacggtctttttgtcagctcccatcaaccatcctctgctggtgggcttttcagcctcaggtttgttgtcccgtggttgcaaaatggctgccacagctctagtcatctcaactgtattcaaaactggaagcaggagcaaaagactgtctttctggagaaactctgtctttgtattctggaaggaaaactttccctgaaagtctcactgagcagaacctgtctgtacacttcagtttttactatttgcacaactgtggttactctaactgcaagaaaggctgggaaagtgagtgtctgataaaggagataggaatgcctctggcttagttcaattattttaaggctattttgaccacaactcacagtccaaaatatgtttctttgtgtcgcagtacacacacacacacacacacacattattgaaaccaatttctcaaatactcactcttaccatgtatgatacacgttaatgtcttccattccattccattccatgcattttaattatttaaagcagttcctggtcacaacctgctaatttgatttcacaaccttcaaaggcatgacccatagtttgagaaagactggcctagaacagtctttgtttacatcttagcgttggcaagtgttaaccctgcacagagtcaggcttctgcgagcggaggaggagaggtggggaaatggtgttttgaaaagcaacagatagactttgccacatcatttgcacttcttatcagcaaatgatatcgttctggagactttgtattactggcaggcaacctgaggttactccaatttatattgggaaattaaaattcgcctgtttgtggagcttagctggcccttttaattccgtatcctgctagcagcctggcttctgcacagctcctgatgacagcgcaaaactccgattgcattacaagtggaggaggaattcacacaattttctggaaggacactgtgtcattgttgcgtcatggctgttctctggagctggttgtggttttcaggcccggcctttcctgctttttatagtgtggtggtgaagagtgaggtcttcagaatcacagggtctgagttcaaattctggtcccatggtgcgatctggggcaagtgtcctgaccacctccgagtctccttttcctgtaagatgtgcatcagcagtgcttccgtggggatggggagggatcggtgggtatggagtaagcacaggggctggtacccggaagcactcaggcaatgcgggctcttcagggtgtgccaggcagcttcggctgtgtgatgccacagtgacgagtgggcccgggtcgcagtggtccgtggtggcagaggctggcttctcgctcgtgtgtgtgcccgtggggggttggctgtggctctggccacatgtccgccctgttctggaactcaggggaactatgtgatggctcttgaagcttctgctctgaacagacacagtgcgcccactccatctcatggaaggagaatctttccgtaggagcaggcccactgggtggggggcagcggacagatggttaaaaagccagtgtgccacaccagggcttgtctccagggtgctggtgacaattttgggtccgcaaccctgcatactagttttcaacccccacccccccgcccccccactctgcaacctcagtcactgtttcaaaagtttctgagtgtggggggtaggggagaggtctccagcaccctccctggctgagaaccaccagctgtgctccccaagccagggatggggtctgcctctgcccttttgctgtcctcagcaccccccaccagacacacagtaggtgcctactaaatgtacatttcagcaggttgcctcttgaataaatgaaaggatttgtttaatttcctctgcaaattcattcattcatcccacagatatttattgagctcctactgtatgccacataatgtgccagccccagggatcttgcagaggacaaaacaagcaaaagttcctgtcctgggggacatttcggtagaggagacacacagtaaacaaccaaaccatcagacggatatatgatatttgatgttaaagttttggttttgttttttttgggatggggtctcgctgtcttgcccaggctggagtgcagtggcacgatcacagctcactgcagcctcgaactcctgggttcaagcaattctcctgcctcagtctcctgagtagctgggattaccggtgtgcaacaccatgtctggctggttgttttgtttttttttaatcttcatgtgtgtcttgaaaggcttcccctgccttctgggttgagagcagcaagacacctagctggcctggtgagggtgcacacagtgcaggtgccgcagcgcccccaaaactgctgttttccattgcgtttatctcatctggaaaatgggggtaataccagggtgtttggaaggattcaaagaaccctggtacctggctgaagcaggagatctgttaacccttccagatacacacacaggccatgtgcggcaaacagcaccaaagtggggccggggacttctgtccagcctcactgggctgtggcccaaaagctctgggagtcgccccattagatagcatcaacagtggcaattaaaatgatcacaactagcgtacacactgcttacaaagtactttagggcatggattagaggtgttcctatgtaacagtcccatggaggacgtagtgttatcctccccaaacggaggcacagaggggataagtaacttgtcttagggtacacggctgggaacgggaagtggcagcccagggatgggagcctcagaatcagtcaaggtgcacttgattcctgctgtgagcatgcacaggcagtaaccccagcccctcgcccaatttctttttttctttttctttttcttctttttttttttgagctctgtcatccaggctggagtgcagtggcgcaatctcagctcactgcagcctctgcctcctgggttcaagcaattctcctgcctcagcctgcggagtaactgggattacaggcatgtgccaccacacccagctgttttgtattttagtagagacaaggtttcatcatgttgaccaggctggtcttgaactcctgacctcagttgatcctcccaccccgccctcccaaagtgctggcattacaggtgtgagccaccacgcccggccttcttttctttttgaaatggagtctcactctgtcgcccaggctggagtgtggtggtgcaatcttggttcactgcagccttggcctctgtagctcaagtaattctcccacctcagcctcccgagtagattggaccacaggtgcccaccaccaccccctggctaattttaaatttttttgtagagatgagatcttgctgtgttgcctaggctggttctccaactcctgagtttaagccatcctcctgcctcagcttccctgccttggctgggattacaggtgtgagctaaccatgcctccctcctttttacttctttgaagtaaaattttcctgtgttgaaacacacaaatccgagctgttaaattctgaacactcacataaccacaccttggtcacaacacggactgtttccctctccccaggaagttcccgttcatgtcttttttcttttttttttttttgagacggagtcttgctctgtcgcccaggctggagtgcagtggcacgatctcggctcactgcaacctccgcctcccgggttcacgccattctcctgcctcagcctcccgagtcgctaggactacaggcgcccacccccacgccgggctcattttttgtatttttagtagagacggggtttcaccattcacacaatggtctcgatctcctgaccttgtgatccgcccgccttggcctcccaaagtgctgggattacaggcgtgagccacagcgcctggccctattcatgtctttagtgttgtcattggaatgaaagcacatgaatacaaaatcctcagagacagctctgcagcctccactttgaaattcaccctcgggactggtttgcagaagcctcacgggagctgcatcccctcctgtctctaattctgctggtaggtaggtcgtgcacagagcttgggccacgcctaccagagccagggaggaggcatgaacagacgtgaacccttcatcttgggagctcgtgcacaccttcaggccaggcaggaacagggcacccgcattccagaggaaaagaatcctgtgttccagggtcttgcgacatctgctttctagctctttctgggatcgggacctgagaggaagagagaaagccactcgccactcctgttccttcctcctccttccatgccagtccctttatctccttttccaatccgaagcatcccaggcattcataaaatgataacagagacgcacacccccatcacccagcctcgcgatagtgcctgaacattctgctgtatttgtttcagatcctacgagagaagtagcaggagagggtcgcctgttgggtagtggtgaagggcgaggcctctgcagtgagcctgcctgggctgaaatcccagcctgggtggggtgcggtggctcatgcctgtaatcccagcactttgggaggccaagggggcacagatcacctgaggtcaggagttcagaccagcctggctgacatagtgaaactctgtctttactaaaaatataaaaaattagctgggcgtggtggtgcatgcctgtaatcccagctactccggaggctgaggtaggagaatcgcttgaacctgggaagcagaggttgcagtgagccgagatcgcgtcattgcacccagcacccagcacatagtgggcccgcagtcagcgtggtttatcattgtcatagtcggtccttgttcttcacagatcccgtatttgcgaattcacctacttgcgaacattggtaaccccaaaacggtgctgatcatttgcagaagtgggtagagtggccaaaaaaattgagctgcctgacatgcaggttcccagctgaggtggggcctgatgtcttgtttcagctcaaattgcaaagcagtgtcgtttttgcaatctgtttagtgccacatttttcacatctttgtgagtctttttttttttttttttgagacggagtctagctctgtcaccaaggctgaagtgcaagtggtgcgatctcggctcactgcaagctccgcctcctgtgttcaagtgattttcgtgcctcagtctcctgagtaggcacgactacaggcacccgccaccaggcctggccaattttttctatttttagtagagactaaagggttttgccacgttggccaggctggtctcgaactcctggcctcaagtgatttgcccgcctcagcatcccaaagtgccaggatacaggcatgagccacggcgcccggctgtctttgtgcttcttattggtgatttctctgtttaaaatggctcctaggccaggcgcagtggctcactcctgtaatcccaacactctgggaggccgaggtgggtggatcacttgaagtcaggaatttgagaccagcctggccaatatgatgaaaccttgtctctacttagccgggtatagtggcaggtgccttatcccagctactcaggaggctgaggcaggaaaatcacttgaacctgggagacggaggttgcagtgagccgagatcgcatcactgcactccagcctgggtgatagagcaagactcacacacacaaaaaaataaataaaataaaataaaataaaatggctacaagcagggtgcagaaatctagtgttcctaagggcagtgaggctgtgatgtgccttctggagaaaatacctgtgttagagaagcttccttcaggtgggagttatagtcctgttagccatgagttcaatgtgaatgaatcaacaatatagattaaataagatggcttcaaacagaaacgcatataagtcaaggtgatgtatcgattgatgggtgaaaatacagtggccagaacctggcaagaacctagccttgtattttccccaggagtggcagctcagcgttcacggtgactttctagaacctcactactgcaaatagcaagaattggctgtattttgttatactgaagtgccagtaaatgacatagtataatgttatatactatgtgtatacatagtatataacactatatgttatatacactatagtgtatgtgctacatatatgtagtatatatatgggataatagtatgtatagtgtggttttgttctatttaaattattcttatttttatttttattttatttttttgagatggagtctcactctgtcgcccaggctggagtgcagtggcacgatcttggctcgctgcaagctccgcctcacgggttcacgcgattctcctgcctcagcctcccgagtagctgggactacaggcgcccgccagcacgcccggctaattttttgtatttttagtagagaccgggtttcaccgggttagccaggatggtctcgatctcctgacctcgcgatccacctgtctcggcctcccaaagtgctgggattacaggggtgagccaccgcgcccggacagatttttttatttttgagacagggtctcactgtcgcccaggctggagtgtaatgccactatcctagctcacagcatccttgacctcgtgggctcaagcgattctcctgcctcagcctctcaagtaactggaactacaggcaagcgaccatgcccagccaaaaaactttctttttgtagagacaagatctccctgtgttgcctagccacgctggtctcgaactcctgagctccagtgatactcctgcctcagcctcccaaagtgctgaatttacaggcgtgagccaccgcgccagccattttgtgtgattctaaattttttaaacttcccttgaatgttgccttttcagcctcccgtctctcttccatccccctcctttgtccatccctctcccacctacatcccatagctctgtccgtctctgaccacgtctttttccttttcgctgactttctcactcactgtctgtctctcattttctccacagctggcccccaagaggaccctttccaagtccccagctgggggccctgtgtagacctggagtggacacgcccctccttcccttcatgattcgtttgtagcgcaggtaaccagcgaagcatccctgttcattcctggaggggcaaccgtccctcattccacctccccagcaccaccttggcccctggatgaggaaggagcattccttcctggaagagcctggctaagcaatatctctggttctttcttctcccacctgggcctcctgggtcatctgggccatcaccctgcctctgcattagctgcaagcaaaatctttctctctgcccctttccccttttctccagattctttgcagaccatgcctttgcatgccttctgtgagcgggttggggagggaaggggctcataggtcatggacctggtgacacagggggaggaagcctggtggggctgggatgtggagcaggtggtgagagtacgtcctcaccacttctaaggcagcgagagcccgggaggcacctccccggggacactccccacagccagcccctgagaggtagagtaattggcgtgtggggctctggagatgcatgtgtctctgtgctgcagggagggtgatccgtgaaccctggaaaagtatgtgtcacatttcttacccacatgcatgttttggcatgaaacatgcgtgtgtcattagatttttcacaacttgattcagcaaatatgccccagcccactgtggggggtccctggtcagggctcttcataatgtcactgagcactggggatggaggacttgggggtggcactaaggaggcccctgttaggggagttcagagtatgctgtcagggtgaggggctgtgaaccagctgagggtgcatgtaagattttatatgtggggtttttgggtgggaatggtgacccgtggcagttgtcacatcgtcagtgaggtttgggaccccctaccccaacaaaaaaagagggtaagggaactccacggtcctgagctgtaaattcccaccattcagggatcaggtcttcttttccattgtgtattgtatgtgtcattgggaggagacgggagcagagggtgcaggaagtaatgaagggatgagtggctggaaggatgggtctgtgtgggtatttggcagaagggaaggaggggtgtttggatggaagcttggaaggatagagggatgggtaggtagatggatggaaggatggagggatgggtaggtagacgggtagaaggatggagggatgggtgggtagatgggtagaaggatggaggggatgggtaggtagatggatggaaggatggagggatgggcaagtagatggaaggatggagggatgggtagctagatggatggagggatgaataggtggatggatggaaggatgggagggatgggtaggtagatgagtggaaggatggagggatgggtaggtagatggatggagagatgggtaagtagatgggtggaaggatggagggatgggtgggtagatggatggaaggatggaggggtgggtgggtagatgggtagaaagatggagggattggtaggtagatgtatggaaggatggagggatgggtgggtagatggatggaaggatggagggatgggtggatggatggagggatcggtaggtagatggatggaaggatggaggatgggtaggtagatggatggaaggatggagcatgggtaggtagatggatggaaggatggaggatgggtaggtagatggatggaaggatggaggatgggtaagtagatgggtggaaggatggagggatgggtgggtagatggatggaaggatggagggatgggtaagtagatggatagatgaaggatgggtaggtagatggatggaaggatggaggatgggtaggtagatggatggaaggatggaggatgggtaggtagatggatggaaggatggaggatgggtaagtagatgggtggaaggatggagggatgggtaggtaggtggatggaaagatggagggaggaggagactgatggctagagggaggaaagaggaagctttggagggagggttggctagttaaatgtttctgagggctggttggatgtttggagaaatgtttggaaagataaagaagtggatggatggatggatggatggaggcagggaagggagggatgttttggagggttggaggaatatttggaggggtgtttgaggggagggaaggctagatggatgggagggtggatgggtaaataaatacagagaacacctgcttcccctggtgtcagatgggactaacgatcccttccctatgggggtggaacaagctaacattgctgaagtgctcagacagtgcctggcacctagtgagcactcgacaaatgttagccatcctcatcctcatcattcagaccatagggctcagccttgccccggtggcttctctgactcagagcgcccctcctcatgagcccctctcccttgcttctgcctcagtttccccaccaccctccccttccttgggaacacattgcagacatcttcaagggtcacccagagccttgagccacaaagcccttcttgtctacactggctccctcactccttcacccgtttatatgtaggacagacccccaccacacgcctcatgtctggggaggcaggacagcagggtggtgaagagcagggctcaggagccaggcttcctaggttccaggcctggctctgctgcctgcttgctgggagacggaggatgaccctcccggtgcctccagttctcatctgcaaagtacaggccgtgggacccctcctgggataccctgaggattagcttagtgtgtgtgaggcatggtcaggactcacttagtcttggttgatatcatcattatcatcatcaggtgctgggagagttggagtgggaggaaaaggaccctgtccctggtcaggggtttctggctgggagggcacctgggaggtattccttgtccccatctatccccatggactcaagggaacagaaactctgaccccctccagggggctcccctgaagggagggggccaggcaagctgccaaaatctaaccttgtctccctcgccctcttcctgaccccaccccatccagtggcgatggatgatgaggatgggagatgcttactagacgtgatttggtgagtaacgggctccccaccccctgccctctgtctcaaccccctcccttccctcccctccccagctccttacctcctcagcgtctcttcctcttctcttccagtgacccacaggccctcaatgacttcttgcatggatccgagaaggtaagcatgggcgcagggagaggcattccctgagtggggggctgtctaattgggagtgagggacagggagagacatgtccctttgatgaggtagccatctgccttgtggcttctaacgccaggcactggagttacggccatgagcaaaactcatggtaatcccctgtcctccttccatggacacctccttgggaaacaaagaaaccagtcactaataaaggtaatggtgaaaaggaccatgtagagtatgataaaaaataataatgtcatttgcacaatgaaagaggtttaaaagaaaataaatgggtcccaggggctcctttagatagtgtgatcagaaagggtcacacgagggaggtaacattgaaggtgagacctgaaggatcacagggaggtaggtggccaggcccggtgctcctggcagagggaagagcaagttcaaaggtgggagagagcttggcatggttgaggaacaggaaggaggctgatggggccaaactgaagggaaaactagtaggaggtgagactgtagtaggtaaaagtcaccaggttgtgtaggcctggaagcccgatagaggagttgttatttttattctgaatgtgacaggcagctctgatgggcccttaaacacgagaatgccatatttgatttgcttcccagagaacggaacaaaatggggaaaagtagaagtctgttgagctctgagcagctgtattagtatctatggctgtgtagattatcccagcatgcagtgccttcaacaattgttagagctcttgcagtgtctgaaggtcaggaatctgggagcagcttagctcggtggttcaggctcagggactctcatgaggttgcagtcaagctgtaggctggggctgcagtcatccaaaggtttgactggggctggcagatgtgcttccaccaggactcattcctgtggctgttggcaggaggcctcagttcctcaccacgggggcctctccttagtgctgcttgagtgtcttcacagcatggcagctggcttcccccagaacgagtgatccgagagaggacacaggaggaacccgcagtgcccttaatgacccagtctccaaagtcccacacccttcctcccatcacactgtattcactagaagctaatcagtcagtctggccagcactcagagggaggggaattgagctccacctcttgaaaggagaggtttcaaataatttatagagcagaggcatgagcaatgggatgatggcagcctgggccatggtgcaggcagtgggggaggcatgtggcactggatttgggatctatctgggaggtggcatcaactagacttgctggtggactcgatgttgagggggagagagtgtccaccatggctcctggattttggcttgagcaactgagtggattctggtgccattttctgaagttgggaatttggggaagattccagaagtccaggtggtgctggtggatgtacaagttggggttctggagagatgtccagatggaacaagaaattagggaagcccgagccatggacatacattcactgggcacatatgtggatgccagggcctgttctgggcactaaggatggtgctaagcatctgagaatgccctgcccttccagagatggcaccgcatggcttgtcaggtgcccggatggtaggtgtgccaggcactcaggctgcgttgggaaaggagtacttagtgagaagggacaggagctgttggaccacgagtgaccactcctgaaggctgtgctactggagagactggggggcagtggcagggcgcagcttgggcagaggcgtgaaggcaggattccggaattcgaggcagtcacagcaggatcgcttcgcaggccaggctcggggactcagtgctggggatgccttgggttttaggcaggcacccaagcccctgcctttggggcctcttttcggaggcgagagtttcccatacccccagccctctcccatcccaacccttgtctttttgtcctgagtgaccctaaattggtttctgctccagagcatgggcctgccctgctgacttttgaccttggatggggcgggtcttgttgcagcttgacagtgatgacctcctggataatcccggggaggcccaaagtgccttctatgaaggtcctggggtaagtgccgtggctcccgatcattgcctgagctgttggggctgccagcgggaggagggccctgaagccaagaggggaggcttgggctcatctcgtgagggctgttgacaggaggagggcgggggtgggccacccagggtggctggaccaccctggcagtgcaggagggagcagagctggggaaccctgtggggggccaacatggacaaggctgactgtgccttgcagaccccttggggaagaggtgagggtccccgaggccttggggccctggggtggctcatgcagagtggttctggggagctgaagcggatgtgggttgtggggttcacaggggcactcctggagagcagagggctgggggaggcctggggtcctgcccaactcagccatggcagggtgtgacctaggggaggggcctcctcacctgcagacttcagtcttcacctgggcagtgaatatgggtgctgagaaaagcccagagtggccaatgcagaggatgtttattgagcacctactgtgtgcctgactatgccggtcccatgactaagtgccagttgtccacaccacggtggccacctccttcctccttctccctcttctgttgctgctttccccccttcaccttttcctccccccaccttccttcggcctcccccctccccgcctccccttcctccttccccccctcaccctccccgccttccctcttcatcatcagaacacgcattcaccaaacacttattatacgaccagcccttccttgttatcttcatttagttctcacagctataatatcatattccaaatagcttatctttcataatataaatgatgaggaaatgtagtaattatataatgttggtctatttacaggcccagtaacagtggtgatcctgttactattttgtgatcacacttcttaccacgaccatcatttttgtataccctaagatccccattcaggttctaaacactctccacacgtgacatcagtgaattttcacaggcatcccaggaggcaggttggttgtgaccatctggcagttaagagctcagggggttacagtggcctgcctggtcctcagtcggttggaggctgagccagagccctgtctgcctgccactccccgccactcaccagtggttgacccaggcagttccctcgtctgtgaaatgaggaagggagcagcacccgcctcatgggactgtcaccaacaacagcatggagaatcacaataataatgagtgatgatgatagatgcttctcgagcacctgccaggggccgggtgataccgtgaaccctccatgtggatttactgagaatcctggaagctgcagattttgatgggttatctggtcagtattggtggagatggaaatctgtatcataagtattgtttgtggggctttccacacatatgcctgcagatatttttccatgcgtgtcctgggttgcagtccaggatagcatgaaaagcacttaaaaagcattgaggctgggcacggtggctcacgcctgtaatcccagcactttgggaggccgaggtgggcggatcacctgaggtcgggagttcgagaccagcctgaccaacatggagaaaccctgtctctaccaaaaatacaaaattagccgggcatggtggcacacgcctgtaatcccggctgcttgggaggctaaggcaggagaattgcttgaactcgtgggcggagattgtggtgagccaggatcacaccattgcactccagcctgggcaacaagagtggaaactccgtctcaaaaaaaacccaaagaaacaaaaagcattgaactcacagtgcggttggcacagaagttcacaaatgggagccactgctgatgtgagctttactccaccagaactacgactgcttgtcagaaacctttagggccaggtgtgtttcagaatttcgaatttctccaattctggaaaagtggtgccatatgtgtggtgtgtgtcatgtcacacgcttgcctttcggcggccaaacttgggatgtcacatcatgtggataaatggatcccacctaaagtgccatgttggttctggtcaggttttgctgccaacagagctatgaaaacagtctcagttcttagagctttttgggttttgtaattacagataagtgttgtgggcctatatcactatttaaacaatagttgcttatttttatttatttttgttttgttttgttttgagatggagtctcactctgtcacccaggctggagggcattggtaggatctcagctcattacagcctccacctcccaggttcaagccattctcctgcctcagcctcccgagtagctgggactgcaggcacgtgccaccacgcctggctaattttcgtatttttagtagagatggtgtttcaccatgttggtcaggcaggtctcaaactcctaggctcaagtgatccacctgcctctgcctcccaaagtgctgggattacaggtgtgagccaccgtgcctagactttatttttgttttttgggcgtcagctggtagagattgggggacagcacccccgcgggcttgggctggatgggcatgggcgtgcgatgcaggatcacgttgggcgccgggaccagtggtgacaagctgaggcctggggccaccaccagcggctttcctgagggtgccccgctgggtcttactcttgtcacttaggctggagtacagtgacacaatcatagctcaccgtagcctggaactcctgggcttaagagatcctctcacctcaggctcccaaagtgctaagattacaggcgtgagtcactgtggccttgaacagtagttttttttattacattttactgatgggtacagatgaagaaactgaggtcagatcaagcacgccctaggttacacagctaagccttggcagagctgggatttgatcccgggtccagccacttgcaggtggaatgttcttttttcttttttttttctttttttcttctttttttttttttcttctcaaagtcttgccctgtcaccgaggctggagtgtagtgaagtgctcgtagctccactctgcagcctcaaactcctgggctccagtgatcctctcacctcagcctcccaagtagctaagaccacaggcacatgctgccacccctgactaatttttcttttttaaaatttttttctcactgcgttgcccaggctggtctcaaactctttggctcaagccatccatcctcctacctcagcctcccaaagtgctgagattacaagcgtgaaccaccatgccaggagggaatgttctttcttgaacgtggctgccctgtcacctcagcattctttgcggcagctgtggcctaagcgtagccccttgctaacctcagctctttccttcccacctttcccggcctgcagctccatgtgcaagaagcttccggcaaccacctgaacccagagcccaaccagccggcccccagtgtggacctagacttcctggaagatgacatcctgggctctcctgcgacagggggcggcggcgggggcagtgggggcgctgaccagccctgtgacatcctccagcagagcctccaagaggccaacatcacggagcagacgctggaggccgaggctgagctggacctgggtcccttccagctgcccaccctgcagcctgcggatggcggggcaggcccgacgggcgctggaggggcagcggccgtggctgcggggccccaagccctcttcccaggcagcaccgacctgctggggctgcagggcccgcctaccgtgctgacccaccaggccctggtgccgccccaggacgtggtcaacaaggccctgagtgtgcagcccttcctgcagcctgtgggcctgggcaatgtgacactgcagcccatcccgggcctccaaggcctgcccaatggcagccctgggggtgccacggcggccacactgggcctggcgcccatccaggtggtgggccagcccgtcatggcgctcaacacgcccacctcccagctcctggccaagcaggtgcccgtcagcggctacctggcctcggcggctggcccctcggagcccgtgacgctggcgtcggccggtgtctcgccacagggggctggcctggtcatccagaagaacctctcggccgctgtggccaccacgctcaatgggaactctgtgttcggaggcgcgggggccgcctcggctcccaccgggacgccctcgggacagccgctggcggtggccccaggcctcggctcgtcgccactggtcccggcgcccaacgtgatcctgcatcgcacacccacgcccatccagcccaagcccgcgggggtgctgccgcccaagctctaccagctgacgcccaagccgtttgcgcccgcgggcgccacgctcaccatccagggcgagccgggggcgctcccgcagcagcccaaggccccgcagaacctgacgttcatggcggcggggaaggcgggccagaacgtggtgctgtcgggcttccccgcgcctgcgctgcaagcgaacgtcttcaagcagccaccggccaccaccaccggagcggccccgccgcagccccccggggccctgagcaaacccatgagcgtccacctcctgaaccaaggcagcagcatcgtcatccccgcccagcacatgctgccgggccagaaccagttcctactgcctggcgccccggcggtccagctcccgcagcagctctcagccctgccggccaacgtgggcgggcagatcctggcggccgctgccccccacacaggtggacagctcatcgcgaaccccatcctcacaaaccagaacctggcgggcccactgagcctgggccccgtgttggccccccactccggggcccacagcgcgcacatcctctccgccgctcccatccaggtgggccagcctgcgctcttccagatgcccgtgtcgctggcggcgggcagcctgcccacgcagagccagccagcgcccgccgggccggccgccaccactgtcctccagggggtcaccctgccccccagcgccgtggccatgctcaacacccccgacggcctggtgcagccggccacccctgccgctgccaccggggaggccgcgcctgtcctcacggtgcagcctgccccccaggcgccccccgcggtcagcacacccctgcccctgggcctccagcagccgcaggcgcagcagcccccgcaggcccccaccccacaggccgccgccccgcctcaggccaccaccccccagcccagccctggcctggcgtctagcccggagaagatcgtcctggggcagccgccctctgccacccccacggccatcctcactcaggactccctgcagatgttcctgccccaggtaagcagggcggggcaagggagcaggtaccggaggaggcgggtttgggaggaagaggggtcctggggcgaggcgccaagatccaaaagtggatgccactgtggcagctggggggggaaggtctcagtcatggcacaggtggcccctaagaggaggcccgaagggtgagggccctggctgaactggcaggaagatggattggcaggttggctgactgatagacaaggggcaggacaactgttaggcagtgagagggactggcagacagacagacaaagagagggaccagtgaacagacagaagggtaggcactggctgggctgctgacagatggagaggagagggaccggcagggagagggactacccgacggacagagaagggcaggcactggctggcctgctgacagacaaggagaggaatctcagagagaaagtggacgagacagggacagagggacaggcaggtggggcaggagagaggcagggcaacgtggagctggcagaggggccaatgggagctcagaatggagcaggctgcctgggtttcggcctctgtgcctggcaccctgcctgccaggctgcccactaccccattctctggaaccctgggagcgtcaataggggcaggggtctcgggtggggaggtcgagggcctgtgggggcggctttctgatcctgtgcgggctgcccgttgcaggagaggagccagcagcccctctccgcagagggcccccacctctccgtgcctgcctcggtcatagtcagcgccccgcctcccgcccaagacccagccccagccacccccgtcgccaaaggagctggcctcggccctcaggcccccgacagccaggcttccccggctccggccccccaggtagagggaccccagcagcctgtgtccgcagcacagacccagcctcgcccctcctgcccgctctcccgctcctcgctctccgccctgcctgcgtctctgttctgctgacttggaacacagagctctccttcaccccccaagtgtctcctagtgatcatggatgcctgagaccagggccggccctgggggagcccacgcgctgcaggaatgcaagacacacacggaaggaaatctgttctttcctaaaattataattttcaaatctgaataagtaatacattcagataattcacatttcaaacggtacaaaaagatgcatagtggaaagcccccgtctcctgaaccgtggcctcctgttgtcctcccaaggtggtttcttgcatttgttatctggatagggaaacagaatcaaatagattcttttccttcaatttttacaaaaagggtagcatcttctgcctgcggtattgcatcttttattatttaaaaattgatcttggagaccattcttcattctctctctctttttttttttttgaaatggagtctcactctatcacccaggctggagtgcagtggcgcgatcttggctcactgcaacctccgcctccgatgtttaagtgattctcctgcctccacctcccgcgtagctggagttacaggtgcccgccaccatgctgggctaatttttgtatttttaatagagacggggtttcaccatgttgcccaggctggtcttgaactccagacctcaagtgatccgcccgcctcagcctcccaaagtgctgagattacatgtgtaggccactgtgcctggccccattcttcattctcttgtgtgactgcgtagtattccactgtgtgggtgtgcggatatttatttagccagtctaaattgttgttaggtttttaggtcacttctgatctctagctattatgaacaaggctgcaaagaatgcctttgtatgtatgtcgttttgtagggtaagttcttcaaaaggaatttgctggctctaaaggcatatgcatttttatctctgacagacattgccaaattgccgcctgtggagtgtaaattagtttaacctttatcagcaatatgtggttgtgccttttttcccccgccccccgcaacctcaccagtatgttgaacttggccaatctagataggtgaaaaatagtatcttgttttgttttcatttgcatttcttttattgtgaatgaggtcgggcagattttcataaaagtaagagccatttgtactttctgttctatgaaactgctcataccctttgccattgtaaaatctgggttgctgtcattttgctgtagatttgtagaaactctttacatattaggaaaattagccttttgtcttaaagtaataaccattatgcttacgagtcataacataacaggttagggagggctacgttctttttttttttttgagatggagtctcgctctgttgcccaggctggagtgcggtgtcgcgatctctgctcactgcaagctccgcctctcgggttcacgccattctcctgcctcagcctcccgagtagctgggactacaggcgcccgccaccacgccgggctaattttttgtatttttagtagagacggggtttcaccatgttagccaggatggtctcgatctcctgacctcgttatccacccgcctcagcctcccaaagtgctgggattataggcgtgagccaccgcacctggcctaccttcttattctagagcagtgaatgtggtactcattcaaaaaagaccagtggataggtaggaagaggagagtgtgacagtgacaagggcaggatggcagaagtcagcacaggctttgacctcgaacggccatggtttcacttgcacgctctcccacttaccatttaaccttcagcaaccagtttttcattccatcagcaggtgcctaggcaggctgagggagcacttaggtggagtaaacgagttactatatgcttagcacaaagtaagcacttgataaatgtttgcttttattattattactattatcttgagggggacagagtcccactccgtcgcctaggctgcagtgcagtggcaagatctcggctcgctgcaatctccacctcctgggttcaagtgattctcctgcctcagcttctgggtagctgggattacaggtgcctgccaccatgtttggctaattttcatatttttagtagagatagtgtatcaccatgttggccaagctggtctcaaacgcctgacctcaggtgaaccacctgcctcggcctcccaaattgctgggatttacaggcgcccgccaccatgcctggctaatttctatatttttagtagagagatggggtttcgccatgttggccaggctggtctcaaactcctgacctcaggtgatccacccacctcagcctcccagagtgctgggatgacaggtgtgagacaccgcgcccggcctagcactctctcatttaaacctcaccacctccaccaggtaggtggtagcatctcattttgcaggtgaggaaacagaggcacagggagaataattagcttgcccaaggttgcacagctggcaaatggtagggcctggattaaaaaccctgggggcttattgctggaaacacctgaagtcttgagaaagccagacctgggtgtgaatccagctctgcttagtggagctctctgaggcatggattttgcatctaaaatgggaataagcccagtgacctgacatgatggcactgcacagagccagcgctcagtgaacagacacttactgttagcagttgcagtaatgatgctgtagctgaacttatttttttggaaacagggtctggttctgtcacccaggctggagtacactggtgcaatattgactcctacaacctccgcctcccatgcttaagtgatcctcccacctcagcctccgaagtagctgggactacaggcatgtgccaccacgcacagctaattttttttttttttgtattttgttttgtgggggagatatggggtctcactatgcagcccaggctggtctcgaactcctaggcttagtaatcctcccaccttggcttctcacagggctgggattatggacgtgagccactgtgcctggccacgcggatgacctttgagaaggaagcttagtgcgcacaggcaggtgtgcacacgagctgattcttagtcacacacagaggctcggaggcacaaggtagggccctccgcagtagctgtatctgcagcagtggggacccagcatgacagaaggtggtcagtgaatgtttgttgggtgagcaaatggatggacagatggatggctgaatagacggacggatggatggcatgggtgggtgtgtgactgggtgattggccaagtgtcccctggtggggacagaatcatccagactgggaaccgctatcctgtggatatgcaggaatgcacggaatagcagttcccaatctgggtgattcttactgtttgtaagaatagtggttcccttactgtccgaactccaacccctgcactcggaaggaactctgtgctctctgtacccagatggatttggcagcctctgtgtgtgtgtgtgtgtgtgtgtgtgtgtgtgtgtgtgtgtgtgtgcgcgcgcgcgcgcatgcgtacattttccctttgtgttaacacaaacagaaatgcaaagactgtgttctgcatctggctttgcttatttagcaacgcatcttggagcactggctttcagacctttttttttccttgacccaccacccgggataagaatttgtttttttttttttttctctgtcacccaggctggagtgcagtggcacgatcttggctaactgcaaccttcacctcccaggttcaagcgattctcctgcctcagcctcccgagtagctgggactacaggcgcacgccaccgcatccagctaatatttgtatttttagtagagacaggttttctccatgttggccaggctggtcttgaactccttacctcaggtgatctgtctgccttggcctcccaaagtcctgggattacaggcatgagccaccatgcccggcacaagaatttcattttatgtcaccacccaggacatgcatacatatatgtatttgtatatatacacatatcactgaaacaaaagtttcatgaaatattacctatattacaatgtgtgatacacatcaatattttctattttgtttccattgttttttctggggttagcggggaggcatggagtctccctctgctgcccaggctggagtgtagtggcactatctcggctcactgcaacctccacctcccaggttcaagcgattctcctgcctcagcttcccaagtagctgggattacaggagtgccccaccatgccaagctgatttttgtatttttagttgagacaaggtttcaccatgttgccgagggtggtctcaaactcctgacctcaggtgatctgcccaccttggcctcccaaagtgctgagattacaggcgtgagccactgcgcccagcctctactgttctttttaagtgctggttccaactccctaagatgacttgagccattaccaatggttactatgtgtaggggtgtgtttttatttttgggggtttttttgcaagctaccatctgggaagattgctgtgatgtgggagttaggaaataggacttggccacttacaggccctgtgaccttcagcaggctgcttgcctctctgttgtaccacggtgtccttgcgtgcagaatcagaatgataggaacagcggctactttgtagagctgtgagggttaaataaactaatatctgtaaattaatagatgtatattaacattaaaatgttttagaacagagttgggcatgttgaaagagctatgaagggaaagaagccaggcaaactttctttttgcttatttgatttttattcatttatttgtttatttttctgggcaactttctataaagaggcaatagtaaacgtttcaggcttttgcgggccatatggtctctgttattatagcacaaaagcagccacagaccatatgtaaatgaatgaacacgggagtgttccaataaaactttatttaaggacactgaaattggaatttcatgtaatttttgcaagtcacgaaatagtattcttatgattttttttcttcaactgtttaaaaatgtaaaaattattcttggcttgtgggctatagtttgcctctttcttttgatgtctttattgtgttttgtgatatggacataccattatttctttattcagtcccctcttgaggaatacttcaggtggtttatttgtcattgttaacaaacaaaactcctataagatattcttgactgagcgtgttggctcacacctgtagtctcagcactttgggaggccgaggcgggcaatcacctgaggtcaggagtgtgagaccagcctggccaacatggggaaaccccatctctactaaaaatacaaaaatgagccaggcgtgatggtgggcacctgtaatcccagctatgctacttgggaggctgaggcaggggaatcccttgaacctgggaggcggagattgtagtgagcctagagagggttgcagtgagctgagatcgtgccactacactctagcctaggcagcagagtgagactctgcctcaaaaaaaaaaaaaaaaacttgcacccatgctttgcacacaggtatgaaagtacttgtagggtaaatttctagaaatagaattgccagacgtagatgataagctttccagccattttgtggaaagtgctaaacctttttgaaaaggttcatgccagtgatggcttcacttggtcctgcagctttactgacacacgagattagcagctggcctgttctttgccaggctggaaagtgacacaccccctgtgcttttctctaattgtgtgtgaagttgagcatcttgccgcctccacgtggggctctcgaaatctcttggaagctgggcgtggtggctcatgcctgtagtcccagctactcaggagggaggctgaggcaggaggatcacctgagcccaggagtttgaggtcagcctgaacaacatagcgagatctcatttctgaagaaagaaagaaatggaaggaagagaaggagggaatctcttggtgaacaatccactcatatgttagtttttttgctttgggaagctaagatgggggatcacttgaggctagcagttgaagaccaaataataataataattttgtgctcatttagagaatgtagaaaatacagaaaagaacaaagaagaaaaataagtcacatgtaataccactgtgtgcaagcagttggtaaaaaaaaattttttctggccaggcacagtggctcatgcctgtaatcccaacattttgggaagccgagttgggtggatcacgaggtcaagatatcgagaccatcctggccaacatggtgaaaccccgtctctactaaaaatacaaaaattagctgggcatggtggtgtgtgcctgtaatcccagctactcaggaggctgaggcaggagaattgcttgaacccgggaggcggaggttgcagcaagcgagctgagattgagccactgcattccagcctgggtgacagagcgagactccgtctcaaaaaaaaaaaatttttttttctttgttttgttttattttttgtttttgagacagagtctctctctctctctcgcccgggctggagtgcagtggcgcgatctcggctcacggcaacctctgtctctgggattggagcaattcttctgcctcagcctcccaagtaacttggatttacaggcacatgccagcaagcccggctaatttttgtatttttagagagacgaggtttcaccatgttggccaggctggtcttggactcctgacctcaagtgatccacccgccttggcatcccaaagtgctgggattacaggtgtgagccactatgccaggcctagctttgttttttctaagacaaatattgtagaagaagtaatattttggtatgaagtttctgtttaaccccccgaccccaattttatttaaaacattttttaaataagtcattttattcacatagtatgatcatcagaaagtttttttttctttttttccagagacagggtcttgctctgttgcccaggctggtcttgaactcctgggctcaagcagtcctcctgccttggcctccgagagtgctgggattacaggcatgagccactgagcctggcctaatttatttttatttattttttctgagactgagtctctctctgtcgcccaggctggagtgcagtggcaagatcttggctcactgcaagctacgcctgctgggttcaagcagttctccctgcctcagcctccggagtagctgggattacaggtgcacaccatcccgccctgctaatttctgtatttttagtagagacagggtttcgccatgttggccaggctggtcttgaactcctgacctcaggtgatccgcctgcctggcctcccaaagtactgggattattataggcgtgagccaccacgcctggccacctggcctaatttttgtatccctttccagttcttcgtgtatatacaacctagtgcaaatatggtttacgtttctctcccatttgtacccaaaggggagctcattatgtacttactgtggcagcaacagtgagtttgcttgttttctgttagagtcttgaagtattcctttgtacagaagagccacagttcatttccccaggaaatgccatattgatgcactttagaccatatccagattttggcgttctacacgaagctgcaggaaacaacttgttcacctgttttgtttttgtttttgtttttgagacagagtttcgctctttttgcccaggctggagtgcaatggcgtgatactggctcactgcaacctccgcctcccaggttcaagcaattctcctgactcagcctccctagtagctgggattacaggtgcacgccaccatgcccagctaatttttgtatttttaatagagacggggtttcaccatgttggccaggctggtctcaaactcctgacctcaggtgatccacccgcctcagcctcccaaagtgctgggattacaggtgtgagccaccgcgcccggcctacttgttcacctgttatttcccacatatgcaggtctgtttacttcctggaagcctgtttgctggactaaagcaaatgtgcatttataacttggatagctactgctgaattgcgttcctcttgagttgtagcaaattgtgccagttgagacccctaagggcagtatatacaagcatctttactagacataggctttattcctaatgcgacgggtggtaaatggtaccctagggtgaaaaatagtgccctggggtgcgttttgctgtgcatttctcttattacaagtgaggttgagtagctctgaaaatacttaagccttttgtctttccttttctgtgcactgtctgatcatatcctttgcccctttttcaccagttgtaattcttagtgatttctagagtctctctatatatgagagagatgaactttgtatttggagttgcaactgttttccccagtaagtcatttggcatgtgacttaatttgtggattgtgtgtgtgtgtgtgtgtgtgcgcacttttgatgagaatgaaattaaatttttttaattttttggtatctttaagctttttatgtttaaatgacttcaaacacataaaaagtttcagaattagtacagagagctcataggagttctttactcctcaactagatgtattagttatctattgctatgcaggaaattaccctcaaaacttagcagcttcaaacagcaagtattcacgtgtctcacactgtttctaaacattaggaatctgaaagcagcttagctaggaggttctagctctggatctcccatgaagttgtggtcatctgaaggtcccactgatctggagaacctgctcccacgctcacttgtgtggctattagcaggaggcctcaattgcttcctcagtgggcctctccaaagggcagcacatgacacacagcggttggcttcccgcaaagtgagtgacccaatagaaacagacagaatgctcaggatgggagccgcaggctttttataactaatcttggaagtgtcatataatcacttctgccaaattctattggccacaaagaccagcatatgggaggggactgaacacaaggaggtgaggattgttggtggctgcctcccacgtctacccattgtcagccttttgctacatctgccttgaccttagcattctcattctgtgtacacttttttctgaatcagttgagagtaagttgcaaccattatacccgtttgccccttaatattttattttatttatttatgtatttatttatttttgagtctgagtctcactctgtcgcctagtctggagtgcagtggtacaatcttggctcactgtagcctctgcctcccaggttcaagcaattctcttgcctcagcctcctgagtggccgggattacaggcacacatcgcaccctgctaatttttgtgtttttagtacagatggggtttcaccatgttgactaggctggtctcaaactcctgggctcaagtgatccacctgccttggcctcccaaagtgctgggattgcaagcgtgagccaccgcggccagcctaccccttaatattttagtataatatttcagccttggagaacaaggacattctcttacttaaccatcatactgcaaagaaataaagcagacagcattgacatgatactgttgtcatatcctctgtccataatccaactttaccaggtgcccagggatcctgtaatgttgtattattctcctatttcatgtagcattggagtgccgctgcatgtgggccacctccctgagcccttggaacctactgagtgggccagttctcttttctccgactcagcgacgcacctgccattggccatttgagtcatttctccttttcctctattgtaaatgctcccaaagtgggcaaccccatagcaagtacttgaatattcttttttttttttgagacggagtttcactcttgtgcccaggctggagtgcagtggcgcgatctcatttcactacaacctccgcctcctgggttcaagcaattctccagcctcagtctcctgagtaactgggattacaggtgcatgccaccatgcccggctaattatttttgtatttttagtagagacagggtttcatcatattgatcaggctggtctcgaactcctgacctctggttatctgcccgcctcagcctcccaaagtgctgggattacaggcgtgagccaccgtgcccggccgaatattcttcatcacagattcctggaggggaatttccaggtcaaagttgtgaccctttcaaagtccccagaccaagctgccttccaggaggcagtcccaccagccgtacacagcgccaaggactgcgcctctcatctcttcttagaggtggcaaaccttttgaagactgattgattgattggtttggtttggttctttaactgtcagaagttactcagggcccagcttggaagggatgctggaagggccctgggacttagaggccaaagctggtggtgaatctgatgtcatgccgagatgcccggttctggagtgtggtggtgctggctgtcctcgggcagatatcctgagccctctgagcctgaactcagtcagctttgagaaatggctcagaagtcactgagcagtgtaaaggcctcagttccgccttcaccagcctggagagtctggaccagttttggagccttggcctcagtttcttatctgtgaaatgggtccagtgttaccactgccctcagggctagggagagatcacacaaatggatgcgggaggccggccattcgtgttagatcagcatgagctgttactaggatgcagattctgtgacagcaagtatcacggtgccagcccagtgttgggtgcacagctggtgcccactggttacacagtggctgctctggttatgattctttgggaggagggtccagaacggcaaggtgctccgtctgagacatgctttaggcgaggtggctgtgtgcgtgtgacagaactagcaccagatcgcgtgtgcttgcagacacaggcttcatcagagtctggtacgtcgtgcacacgcatgcacgcttgtacctgcaagctcacgtggcgcccaggtaggcctgcagccatggacacacaggcacacagaggcaggtgcccaggacacttagaagggggtccaggccttcccatgcccgcatccagaggtccacacgtggctgtgaacccaggcctgtccctgtgtggccatccgtattctcggcagcccccgtgccgtggccatcaaccccgagccatggtacacagcatcatgctggtgtctctttgccttgacttggctggatgggctggtgggggctggcggctgggacgctgccctgcctgccctccttccccgctgctgtgctcgccgcccggccctcctgcctcctgctgggcagcgggtgtggtgcccctgctgccaccgccaccactgcctctgcttcctctgctgctgccaccccaaccctgcagggctcgcctttgtctggggaactgcgaggggtggggggaatggggcagaagtggggttgagatcggaggccagagaaatgtggaggagctgcggtgggggacagaggtcgagggcaggtggagggggtgctgtggggaatgagaggcgagggagggaagggcagccgtggtgggctcctctctcaggatgggtgtgggctaggaagggggcttctggcggggatggctggggaccccagtgtcttggggcaacaggagctatggttggttctgacccccgcccctcccctctccctccctcccctgcccagatcccggcagcggctccgctgaagggcccaggcccctcttcgtccccgtcactacctcaccaggcccctctgggggacagcccccacctgccctccccacaccccacccggcccccttcccgcccaccctcccggccacagagtgtgtcccgccctccctcagagccacccttgcacccttgccccccaccccaggcccccccaactctgcctggcatctttgtcatccaaaaccagctaggcgttcccccgcctgccagcaacccggcccctactgccccaggcccgccgcagccgcctctccgcccccagtcccagccgcctgagggaccgctgcccccagccccccacctccctccatcctccacctcctctgctgtggcctcctcctctgagacgtcctccaggttgccagcccctacgccatccgacttccagctccagttcccacccagccaggggccccacaagtcccccactccccctccaaccctccacctggtccctgagccggcagcaccccccccaccgcctcctcggaccttccagatggtgaccacccccttcccagcgctgccccagccgaaggctcttctcgagagatttcaccaggtaacgggaggcagggactgcccgccccatcagccccatcccatcccaccctctcagtctgatgggagcccctccgccttacggctctgtgatcctccccagccctgctgcgtctggacacccctacacctagcctatgttccccacccctcatccacctgtcccctcctcaggtgccgtccggaatcatcctccagaacaaggctgggggggcccctgccgccccgcagacctccaccagcctggggcccctcaccagccccgctgcgtctgtgctggtcagtgggcaggccccatctgggacccccactgcccccagccacgcccccgccccggcacccatggccgccacaggtaggagagaggtcgcctatgtgcccagggagacggggcctgaagatgggtgggcggggctgagcagggagaatgggctggggcagggctgtgggactcagcacagggcatcagccagaactcaagggacacaggaaggccagaggtggcagggctggccccagatttgaagggccggagggccaggaggagagcggtggggtacaggatggggctcccgtttgaggagggggccttcatgcagtgaccgcaggccctgtctcccccaccccacccacccccaggcctccctcctctgcttccagccgagaacaaggcttttgccagcaacctcccgaccctgaatgtggccaaggccgcttcctccgggccagggaagccctccgggctgcaggtaaggggcccttagagcaggggtcaggacaggaccaggagtcttcgggaactgggaactggggctggcaggggcagggagacactggaagacgcggacaggatgaagctgggaccatcaggcagctgagacaccacgaacagccgtgcagggacaggaagggcagaatgacacccagacaggcagccagagatgagggagaaacacggagacggtgggacggagacggcaccaagactactggcaacagtgtaagggactatgactggggaaagagcaggtgatatggacacaggacgggaaggacagggctgagatgacaagatgtgagctcaggacaggaaaggcgggtttagatgagacagaccggagacggagcagatcagggaccgagaatgaaagggtgagagggtggggacagctgaggccgaggccacttgtagatgtaagacgtgggggagacagaagacaaggagaggagcaggtgggaggaccaggacccaagaggccgggagaagctcagagatggagatgccagaatgaaggccagacgctgaggacaagaggggaagccaggaagggaggcgggggggcgaaacgacaggagccacactgggagagagactgtgcgaggcaggggcactgggtgctgggcggtgatgtgggaagcaggcatccggcagaggagggaggtcacacagaggcagccctgggcgaggggacggagggaacccaggcagaggacacccagggctccagcctgcctgtcaccctctccgtccactccccagcccagcccaggtcttcccctggggttcattgtgatgggcaggggatcctgtagctggggccaggcccccacctgggtgagacactggtcccctgtcccgtctttatcctaggctagaggggaagctggtcgggggagggaaggcttctggaggcaaaggcctctcactcgcctttcttctcccagtatgagagcaaactgagtggcctgaagaagccccccacgcttcagcccagcaaggaagcctggtgagtccacaccccatccttgcatgcctgccctgtaccttccagagacctgggggagcatggggccaccctccagaagcagagttgggcaggcccaagtgccaagcccagctccacctcttggtagcgatgtagttccctcatagaccctcagtttccccctctggaaaatggggtgaccagagagtggtggagggagggtgggctgtggctccgccaggctggggctcaggagggcggcagtttggtccatcctggttgttgctgtgccctccatgtctcccacacggctgggccgcgtcggtgctgagccccactgggtgggtgaagtgatgggtgggggaagtgagtgggtggacatggctgttgggaggatgatggggggggtgtttggggatggatggatgggagtctgggcggatggatgggtaaatgctggatgcctgcctgccctctctcctgccctccttccaccaccagggttttttgttttgttttagggggggttctttgagccagaatcttactctgtcacctaggctagagtgcaatggcacaatattggctcactgcaacctccgcctcccccgttcatgtgattctcctgccccagcctcccaagtagctgtgaccacaggcgtctgccaccatgctcggctaatttttgtatttttagtagagatggagtttcaccatgttggcctcaagtgatccacctgcctcggcctcccaaggtgctgggattacaggtgtgagccaccacgcccagcccaccatgagtgtttttttaaaaacatataagtccggggggcagaggttgcagtgagccgagatcatgccattgcacttcagcccaggcgacagagcaagactgcatgccctcacccaaaaaaaaaaaatttttttttatatatattgtggagacaaggtcttactatgttgcccaggctggttggttttgtttttgttttgttttgtttttggagacgaagtctcattctgtcacccaggctggagtgcagtggtacaatctcggctcactgcaacctctgcctcctgggttcaagtgattctcctacctcagtctcccgagtagctgagattacaggtgcatgccaccacacctgcctaatttttgtatttttagtagagacggggtttcattatgttggccagtctggtcttgaacttctggcctcaggtgacccacccatctcagcctcccaaagtgctgggagtacaagtgtgagccaccatgcccggcctaggttggtctgaaactcctagtctcaagtgatcctcccacctcagtctcctgagtagctgggactacaggcacgtgccaccacactcggctaatttttaaataatttttgtagagacagggtcttgctgtgttgcccaggctggccttgaactcctgggctcagacaatccttctgcctcggccccgcaaagcgctgggattgcaggcgtgagcctctgcttggcctaggagtgtgaattaagtccccactcagtgcccaggcctgagccccatgttgggaacacaggagtaagtgacacaaagtccctgcccccacagtgcagagaggctgctggtttttagccgagggtggagttgggcctgcctggtgggggagacagtcacactgccaacagacaaaacccattgtaacatgggctacaaaagcggcccgtgagaagacaggatccagcctccctcccttcttcccgaaggctgcactttggaggaggcacggtggagccacactggccccaggtggcaggaggcagaatagcagcttccaggctctggcctcacttcccgctctgctcttcctcccttacgtgctttggagaggagtgacttcacttcctcgacctcaccttccctttctgtaaaatggggatagcgatagcactgctttggtcggccccagggactcagtgagatggaacaagcacgttcagtacatgggaacaccactgcccaagtattccccttcccgctgttgtgttcagttgcggcctggggctgagggttcagggacttcccctggccctcacccgtcccccccaccctccgccgtgtgtggtctctcccctttccacccgcagtttcctggagcatttgcacaaacaccagggctccgtcctgcaccccgactacaagacggccttcccctcctttgaggacgccctgcatcgcctcctgccctaccatgtctaccagggcgccctcccctcccccagtgactaccacaaaggtgaggcctccccaggacacggccctatatgtcccaggggaccccagcccgtggggcggggcgtcgccagtgtggagccgcaggtccacggtgcgctatgctgaccctgccccgccctccttcctgcgcatccgcggccgcccccaacatctccgcccttgcctctcttcccttcctcgcagtggacgaggagtttgagacggtctccacgcagctgctgaaacgcacccaggccatgctcaataaatatcggctcctgctcctggaggagtcccgggtagggtcagagtcgccttcctcgcctctgggctcctcctcgctgggacactgcccctttccctcacccgctctgggcaaggtggagcctcccgcccctcctagccccgggagggaggttgggagggaggcgggagctcccatcacaaggacagtttggaccttgcacgcatcgtccccgtcgctcgcgccccttcccccttcttgctggttcactcgcacgtcgtcttttcccccaccccagagggtgagcccctcagcggagatggtaatgatcgaccgaatgttcattcaggaggagaagaccacccttgccttggataaacagctggccaaggagaagccgggtgagaggggggagtgagaggggaggggagggagaggtgcccccaccccacctgggcagaagagttagattcagggcggggagtgggtgtgtggccctacctcactccaccactaggcggtgccccagctccaccttcctgctggcagctgtgcctcccctgacctcccgcctctcagaccagatagcccacatccatcttcctccatccctgtgtggcccttccacccccaccactctgggatggggggaatatttctgccacccccgtgggacacaaaacaggagagcaggcgcctaggttgcaaaatatataaggtaacgcccactcttgggtgccagtcctttgcttggggaccctgagagtgagcacctccttaagtgttgcaccttaggtggctcgctggcctcactctagtctcctgtctgcaggaaacggtacaggcagatcccagctgccagagtttccagaatattcccttagcctttgcccacattccaactccagggcttccctggataaaagcatggtccctgctttgtgctgccaggcgcaggctttttacgtcgagctctggaccttaattttgaaaaagtagtcattggtacttaaatgagtgcaaaggggtggccatagtgaaggaggggccaggagcgagtctgaagtctctagggtaggagaggaagggtagttccgtggttaggggctcgatgctggagtcttggtttaaatcctggctctgccacttactaactgtgtgaccttgggcaagttacttaccttctctgtgtctctgtattctcattttgtaaagtgggggttatgatgatcagcttacaatctcttatctgacaccctcggggcctgatatgttctggaatctttttgcttttagaaaggcaatgagctcactccagcctgggcgacagagcgagactccgtctcaaaaaaaaagaaaggcaatgagctacctcaatgctgtcttctgatttacccccagtgggtttggggaagcactgtgtgatcaaacacactagtatttctggagtgaaatcgatgggtatccagagtagttgagataaatcatgaccataaataacctcatgtagccgggtgtggtggctcacacctgtaatcccagcactttgggaggctgaggcgggcgatcacctgtggtcaggagtgtgagaccagactgggcaacgtggcgaaaccctgtctctactaaaaatacaataattagccaggtgtggtgtctggcacctataatcccagctacttgggaggctgaggcaggagactcgcttgaacccaggaggcggaggttgcagtgaggtgagatggcgctactgcactccagcctgggcaacagattgagactgtctcaaaaaaacaaacaaacaaacaaacaaaaaacctcatgtcatttcggaccagattttgaaattagatacctccttagccccatttttaaaaagttatgtatataattagagcagtgctgtccaatagaacttcatattttatttattgtttttttgtttgtttgtttgtagagacaggggtctcactactgtggccaggcaggtctcaaactcctgggctcaagcgatccccctcccttggcctcccaaagtgctgggattacaggcctgagccttgttttgtattctcttaatttacttatgtctgaatgagccccacgtggctcgtggcgctgtgccaggcacagtggttttagagttgggggaatttgggccttgctgaagagggtctcaccaagcctatcctgaggattggagggtccagggtgcagtctggtgcctggcaggtagtaggtgctcactgcacacagctcctcccagctcggtcggggggtcctcatcctaaccccgcgggttttctttgccccgattctgcagacgagtacgtgtcttcctcccgctcgctcggcctccccatcgcagcctcttccgagggtcatcggcttcccggccacggccccctgtcgtcttcagctcccggggcctccacccagccccctccacacctgcccaccaagcttgtgatccggcacggcggggcaggcggctccccttcggtcacctgggcccgggcgtcctcctccctgtcctcctcttcctcctcctcctctgccgcctcctccttggacgccgacgaggacggccccatgccctcccgcaaccgcccgcccatcaagacctacgaggcccggagccgcatcgggctcaagctcaagatcaagcaggaagccgggctcagcaaggtcgtgcacaacacggccctggaccccgtgcaccagcccccgccaccccccgctaccctcaaggtggccgagcccccgccacggccgccaccaccaccgccgcccacgggccagatgaacggcacggtggaccacccgccgcctgccgcccccgagcgcaagcccctgggcaccgccccgcactgcccgcgcctgccactgcgcaagacctaccgcgagaacgtggggggccctggcgcgccggaggggacgcccgcaggcagggcacggggaggcagcccggcgccgctgcccgccaaagtggacgaggccaccagcgggctcatccgcgagctggcggccgtggaggacgagctgtaccagcgtatgctgaagggccccccgccagagcccgcagccagcgccgcccaaggcaccggggaccccgactgggaggcgcccgggctgccccctgccaagcggcgcaagtccgagtcgcccgacgtggaccaggccagcttctccagcgacagcccgcaggatgacacgctcaccgagcacctgcagagcgccatcgacagcatcctgaacctgcagcaggcccccggccggacgcccgcgccctcgtacccccacgctgcctcggccggcacccccgcatccccgccgcccctgcacaggcccgaggcctacccaccctccagtcacaacggtggcctcggcgccaggacgttgaccagataacaccgggccgcctccccttccccgtcccctcctcccgaagacgccgggacagtcgggtgtccgccctcagcctcctggggactcgagccggggatcccctgacggtttttcttgcctaagttatttgagtcacaaaggcctccttccctgccgcctgcttcagctgggttgctggggggtgggcgtggatttagggagggggctgtgatgtaaaacgtctcccctgccaaaggaggggcaaagtgctgtgtcagttcctgtttcttcccatttcctggcacactctgcccctctgtccgggggacacgcgcatgtgtttgccagggatggggccaccgggttgatgccaacgctccgggtgcctgtcttgtctgtgtggcttctcagatggtggagggtgctgggagctggcagggtccttccagacagtctcagcctctccccgccgcccccaacaggctgtcaaacaaaaccggagagggggtgggggagccagcctcccagcgtgctgtgcccgcaggcacccgtgtgacatccgcacgtccagctccgtgacctgtgtgtgtgtgtgtgtgcacaagtgagtgagagatttcgaacgcccacccctcgactttgaaatctgagcaaaacaagaaactggggtcttcctctcccccgaacctctccccagctagtcttccctctgttcttcctgcctccagccgcccgcgccagattttgaaatctcggagacaaaactagtactgtaagataaatttttttgtactgtatttattgtgtataacgatttttttaaaggagaattctgtacatttagaactcttgtaaattaaaaaccgatcctttttttaaaactgtactcatgcccccttggcccattgcttttgggtttgtgagggtgggggagtgtttggatctgggattgtgaggccttcttccgcatgcatctgttgagcacctgctgagtaccaggccccgttctaggctcagggggttcaacatgaacaaggcagacaagagtccctgctaagccggtaagctgacttgttagtggggaaggcgggtggtaaacagctaagccagatcaagccagttcttcttatttccggtaaggttctataatctctgcatacactctgagaattagtgaatactgagccattgcccccagggagacagggttaggtttctaagggcctctgatcaccacagttcagtcaatacatcaccttagtttacatgtgttgctgtttaaaaacacttctttatgtatttttgagacgggctcactctgtcacccaggctggagtgcagtggcacgatcgtggctcactgcagccttgatctcccaggctcaagtgatcctcccacctcagcctcccgagtagctgggattataggcgcaccaccacgcttagctatttttttttttaatctttctgtagcaatgggatctcactatgttgcccaagctggtctggaactccacggctcgagtgatcctctggccttggcctctcaaagtgctgggaatacagacgtgagccaccacgcccagccctaaagataccttatttcatttatattgttgattcattcacattgaagtcatgccaacagcattataactggaacctggagcaagcctatttcacacatatattttatcttttctccaaaggcacatcacagcttcttggtgctttaaggtcactagaccgcacttcagctgtacgcttgggcccattttaaacaatgagtcaccaacaaaaagcacaaaaatgtgaaaagcgtgggactagataaaccaagaaaaggacgcgtgtttatggtacgagagccaaaacgagggcagaatgtcgccttattcaacctcagctgggaacgaacgtctgtgttgggcaacttgatattttgctgccgtgtgtgtgttgagagtcttgacttgggggttacaaagaagttttgatgagcagataaatgcacaaatatggcatttgcaaatagtgagggtccactgtaaatgtatacagtgtcagatgcccatataaagaagaatcaggccaggcacggtggctcacacctgtaatcccagcactttgggaggccaaatcgagtgggtcacctgaggtcaggagttcgagacctgcctggccaacatagtgaaaccccatctctacttataaaaaatatatatatatacaaaaattagctggcatggtggcacacgcctgtagtcccagcttcttcagaggctgaggcaggagaatcgcctgaacccaggagatggaggttgcagtgagacgagactgacactccagcctgggcaacagagtgagactctatcccccgaccaacaaaaaaaaagaagaaaaaaaatcatgctaggtgtattagtcccctcaagctgctataacaaaatgccccaaatagggcagcttaaaacaacagatatttattctcccacagccctagaggcctgaagtctgaaaacaaggtggcatcagggccatgcccactccagaggtgctagggaaggatccttccttgtctctgccagtttctggtggccccaggttctccttggcttgtggctgaatcagtccaatctctggctgacttcccactgtatctcttctcttctaagggcatcagtcatattggagttttgcccatcctaccagtatgcccttgtcataacttaatcatatctgcaaagatcctgattcccttttttttttcttctagctttctttttctttttctttttttgagacagatgtcttgctctgtcgcccaggctggagtgcagtggcacgatctcagctcactgcaatctctgcctccagggtttaagtgattctcctgcctcagcctcccgagtaactgggactacaagcatgtgccaccacgcccagctgattttttgtatttttagtagagacggagtttcactgtgttagccaggatggtctcaatctcctgatggcatgatccaccggcctcagcctcccaaagtgctggtattacaggcgtgaaccaccgcgcccagcccttctagctttcttcagatcacagaccctgattccaaataaaattacattcacaggcactagggttaggacatcagcctatattttgagaggacagaacaactcaatccgtaatgcagggtaaggaggtgggtgtcacaagtgagtgacaattatctgggctggtggtgtgggggtaaaagaatttaccaagacagtggtaggttaaaaaaaaaaaaaaaaaagcagatttatgggctcacgcctgtaatcccaactctttgggaggtgggcggatcacttgaggtcaggagttcaagaccagcctgactaacagtgaaaccccatctctactaaaaatacaaaaattggctaggtgcagtggctcacgcctgtaatcccagcacttcgggaggctgaggtgggtaaatgacctgaggtcaggagcttgagaccagcctggccaacttggcaaaaccctgcctctactaaaaaatacaaaaattagccaggtgtggcggcaggcacctgtaatcccagctactcaggaggctgaggcaagagaatcacttgaacccaggaggcagaggttgcagtgagttgagatcgcgtcattgcactccagcctgggtaacaagagtgaaactccatcgaaaaaaggtaataaataaataaaaatacaaaattagcagggcgtggtgatgcacacctgtagtctcagctacttgggaactgggaggatcacttcagcccaggaggcagaggttacagtgagccaagactgcaccactgcactccagcctgggcaacagagtgagactccatcaaaaaaaaaaaaaaggcagatttatgaaataaagtaggaaaatatattgcaaagttgcaatgggcaacacagccagggagaagctgactgcaaggaaacaaaggcttgctgggggttgtataggatggagttggttttttcatttgctttttagatagagtctcgctctgtcacccaggctggagtgcagtggcatgatttcagctcactgcaacctccgcatctcgggttcaagcaattctcctgcctcagcctcctgagtagctgggattacaggcacccatcaccatgcccagctaatttttgtatttttagtcgagatggggtttcaccatgttggccaggctggtctcgaactcctgacctcaagtgatccgtctgcctctgcctcccaaagtgctgggattacaggcgtgagccaccatgcccggcatataggagagttcatgttgtgtgctgaagagggctttgtgcagtactgataatgccagggttacagtgagctcacttgcaggtgtctggtgatacttgggcgcaggaagattgagttatttgtataggagggctatgtcctggacagtaaagaaaggcagacctgtaacttagctgctttatctttttgctttcctgcattctcagcagcctgactctccctaattaggactccgcaagtgggcaagacagctgtcaggccctagtatgcctttgtgtgaactagaaaagggcacccctctctcctgggcccagaatttgaagagcagagcatgagctgggctccagtcccctctcacccattcagtgagtgccttgtgcagtgaacaacctgcccaactgcacatcagggccctcgggatcaggtgggaagggaaagattctttgaggaggtgatatttgagcagagacatgcaggaaaagagggaggaagccacaggagagctctcagggaagagcatccaaggcagagggaaccgccagtgcaaaggccctgtggcaggagcctgcctggagtgtcgaggaacagcgaaaaagccaatgcggctgcagcccataagtgatggggagaggtctggaggtgaggtccgagggggaacaaagggcacctcatcgtgcgggaccgtgtcctccatggggatgatttcgctgttacactgagacgggagcttcaggagggccctgagcgaacttaggttccccagcaccctctggtggctgtttgcgggaatagacgaggggtaagggtggaaaccaagcgcagcgaggaggcaactgctgtgagtccaggtgggtggttgtggcggctggaccggggtgatgcaccctgtttctctgcaggcccctggaagtgttttgtttgtttattttttggttgtttttaggacacagggtctcggcccagcacagtggcttgctcctgtaatgccagcactttgggaggcagaggcaggtggatcacctaaggtcagaagttcgagactagcctggccaaaatgtcgaaatccggtctttacaaaaaaaaaaaaaaaattagctgggtgtggtggtgtgcgtctgtgatcccagctactggggaggctgagatgagaggattgcttgagcccaggagatggaggttgcagtgagctgagattgcaccactgcttgcacttcagcctgggcgatacagccagaccttgtcttagagagagagagaggcagacagacagacagagagagagaaggtctcactgggtcacccaggctggagtgcagtggtgcaatcacagctcactaaagcctcgaactcctgggctcaaaggatcctcctggcacagccttctgagtaggtgcataccacctcacttggctaatttttattgttttatttttattttttgtagagacaggggtctcactggcctatagcagtcctcccgcatcagcctcccaaagtggtgggattacaggcatgagccatggcaatgggccccctggggttgtatgtgggtgggaaattgatatctggggtctcagagggatggaccatcccctttcctagctctagaactactccctccacgtgtgaaataaagcactataggaaaacagctgtttcttaaaaaaaaaaaaaattttggctgggcggggtggctcatgcctgtaatcccagcactttgggaggccgaggcaggcggatcatgaggtcaggagatcgagaccatcctagctaacacagtgaaaccccgtctctactaaaaatacaaaaaaattagccgggcgtggtgactggtgcctgtagtcccagctactcaggaggctgaggcaggagaatggtgtgaacccgggaggcggagcttgcagtgagctgagatcccaccactgcactccagcctaggtgacagagtgagactccgtctcaaaaaatagataaataataaataaatagataattttttttgagatggagtctcactctgtcgcccaggctggagtgcagtggcacaatcttggctcactgcaacatccgcctcctgagttcaagccattctcctgcctcagcctcccaagtagctggaattacaggcatgcgccaccacgcctggctaatttttttgtacttttggtagagacagggtttcaccatattgcccaggctggtcttaaactcctgggctcaagcgatccaccctcctcggcctcccaaagtgctgggattacaagtgtgagccacttcgcccagcctaaatggctgtttcttaacatccttggatcacaaaactctcggagagactctcctgaaagacccctcctgattactcacaaggactcgtccacaatttccacgggctccgggactcagttctgcaaggctgactgcctgcaggcgagcggaagaacagaacagcagtgaccaacctttactaaacagggaaccgcatgggttagcatatctggtcctcacagcagccccagcgtgggaactaataggcccagcttgcaggtgaggaaactgaggccccaaagatgtagtacatggcagactgggctgtgagccaacctgcctcaatgcattcattagagagagctggctgtggggccagtgagcgatgagtgtatacaatcgctgaaaatatccacaactgggctgggtgcggtggctcatgcctgtaatcctagcactttgggaggccaaggcgggtgaattgcctgagctcaggagttcaagaccagcctgggcaacatggtgaaaccccgtctctactaaaaaatacaaaaaattagccaggcttgttggtaggcacctgtggtcccagctactggggaggctgaggcatgagaatcgctttaacctgggaggcagaggttgcagggagctgagatcgcaccactgcactccagcctgggaaagagtgtgagactctgtttccaaaaaaaaaaaagaaaaaagaaaaaaaaatccacaactgcaaaccgatgaacgcatcagtgattcctctgggtggcggggacccaggtcctgctgatgacgctgtgctttgctgctaacatttgtggttgacagaaactctgaattttagtgaaaactccagctgtctttttccccccacatctaagttcacagatcctccggaatttttttttttttttttttttttgagacggagtctcactctgtcgcccaggctggagtgcagtggtgcgatctcggctcactgcaagctccgcctgccgggttcacgccattctcctgcctcagcccccagagtagctgggactataggcgcccaccaccacgcccggctaatttttttgtatttttagtagagacagggtttcaccgtgttagccaggatggtctcaatctcctgatcttgtgatccgcccgcctcggcctcccaaagtgctgagattacgggtgtgagccaccgcgcccagccgatcctccagaatgttttgcaacaggttgagaagccctggggtagaagtgaaacaagactctcccatcagacaactctggctcaactccgagttcttccacaccttggcaggccaaactctactttctttttttttgagacagggtcttcttctttcacccaggctggaatgcagtggcgcgatcacagctcactgcagcctcggcctcctaggctccagtaatcctcccacctcagcctcccgagtagctgggaccacaggtgtgcaccaccacactcggctaatttttagattttttttatcttgcagagatggggtctcactatgttgcccaggctggtcttgaactcctagcctcaagcaatcccctgccccagcctcccaaagtgctgggattacaggcatgagccactgcacccagctctgagactttacttccttgtatttcaactttcccatctgagacatagcaataataataataataacaataataacaggacttgccctcctgggggaagggagatgatttaggtgatgcttttggaacagggcctgtctcctagcagtaacaacattaacgtaagttatcattaagctccagaccttttatatattatatatataatagtaatattatagtaacatgttattggctgggcctgctggtgcatgcctgtaatcccagctactcgagaggctgaggcacgagaatcgcttgagcccgggaggcagaggttgcagtgagccaagatcgcgccactgcactccagcctgggtgacagagcaagagtctacctccaaaaaaaatagaaaaaataaataaaatgttataattataataatataatatataatatcagttttattgagatataattcagaagccatgcaattcacccatttaaagcatacaattcagttgggcatggtggctcatgcctataatcccagcactttgggaagctgaggtgggtaaatcacttgacgtcagaagttcgagaccagccaggccaacatggtgaaaccccttgtctgctaaaaacacaaaattaggccgggcgcagtggctcatgcctataatcccagcactttgggaggccgaggcgggcagatcacgaggtcaggagatcgagaccatcttggctaacatggtgaaaccctgtctgtactaaaaatacaaaaaattagccgggaatggtggtgggcgccgtaatcccagctactcgggaggctggggcaggagaatggcgtgaacccgggaggcggagcttgcagtgagccgagatcgtgccactgcactccagcctgtgcgacagagcgagactctgactcaaaaaaacaaaacaaaacaaaattagccaagtgtggtggcatgcacctgtaatcccagctactggggagattgagggaggagaatagtttgaacccaggaggcggaggttgcagtgagctgagatcgtgccactgcactccagcctgggcgatagagtaagactgtctcaaaaacaaaaacaaaaaccaaaaccccaaaactcctgtttcttggagatatgatgagggttcgatgagctaatacatgcatgcaaagagctcagagcggtgcctgcacataggaatggctcagtcaacattagggattgtttctacaaatgtttactgagcccctgcagggagttgggcattgtgcaaagccctcacggggctcatgttctcagggcaaagacagtcccttaggcagagaaatgtggaatatgcagagtggttgggagggctgtggagaaaaatagggcagtgataagaggtagagagtgggttctaccttagccagggtgatcctggaggacttctctgaggaggtgacatttgagcagggacctgaaggaggggagagagtgaggcattcagatccctatggggaaagtactccatggagaggagtcagcaagtgcaaaggccatgaacttggagggttgggggtgtgtctgaggaatggtgaggaggccacggcggttggagccgcctgaggaagggggacaggggagatgtaggtggatcatgctaggctttgtgggccttggtgtggacttcggcttttactctgagagagaggagagccagggagggttgtcagctgagaagtttcatcaactcccttaagttttaatattaatattatatttacttatttatttgcgatggattctcactctgtcacccaggctggagtgcagtggcgtgatcttggctcactgcaacctctgcctcctgggttccagtgattctggaacttgggagcctcagcctcccaagtagctaggactacaggtgcgtgcctgcatccagctaatttttgtttatttatttatttttgagatggagtcttgctctgtccccaggctggagtgcagtggcgcaatcactgcaagctccacctcccctgtgtttaagtgattctcctgcctcagcttcccaaatagctgggactacaggcgcccgccaccacgcccagctaatttttttgtatttttagtagagatgggtttgcaccatgttggccaggctggtcttgaactcctgacctcaagtgatccacccgcctcggcctcccaaagtgctgggattacaggcgtgagccaccgcgccccgtcctattattttttttagaggtgaggtctcgctctgtcacccaggctggagtgcagtggcacaatcatagctcactgcagccttgacctcctgggttcaagctatcctcccacctcagctttccaagttgctgggatcacaggtgtgcacccctgtgcctggctaaattattttattatttattattatttttaatagacatggggtctcgctatattgtccaggctggtcttggactcctggcctcaagcaatcttcccaccctggccttccaaagtgttagggttacaggcgtgagccagggcgcccgacctgttattgttactattattgctgctgctgttgtgattcccgtgttaagaagagagacagactggggagcagcccaacgctggaggtggaggcggaattcgaaccccaggctggacgctggagctctcgcccgccgtgctaaggcgtcttccccactccccacaagggggcgccagaggccgggcgcccggttttgaggggggcgcctcgtcccgcccctccctcctgtcctccctcccgtcctccccgctccgggccccacccggctcagacggctccggacgggaccgcgagcacaggccgctccgcgggcgcttcggatcctcgcgggaccccaccctctcccagcctgcccagcccgctgcagccgccagcgcgccccgtcggtgagtgctcccagcaccgcagctgtcgcctcccgacccccgcccaagcctgccctggttcctcatgcctgacccctgctccctgccaccctgtccccagtctgtaacggtctccccaggtgtcccccagtcttcaccagtccccccagtctgtaaccatgtcccccactcttcccactcctcccactcttcctcccactcttcctccagtctttcgcagcctctcacactcccccagtctcctccatcctcccccaacacccctccctatcccctgggctagaagagatcctctctgcagggtctccctccacgccctcatccatatcagctaacttggtccctccagccactcaagagcccctctcctgcctcaccagctccatcggccaccgctgatagcattctccccagctctctctcagggccctccctgcctgggacaccgcccagagccctctccctctgcccacatcccagatcctgcctctcttttccattcttgccactcctttacgaactccttttgcttttatctcccctactccctggccaccccttttaagtctcatgattttatggattttagcatatttgatttgcagttattttgatgctcaaattgccccatgtttggccactgggcacccctgcaagctgggtcctctgtccctgtaacatgccctatcggcctttgagcacttcctcaccttctgacccaggctcacttgttcttccctgcccccgccctggaatccaccatttctctaaggagtcccaggttcttttagtggggaatggtatttagagactcccatctcaccaaaagttgattctttgaaaagatcagtaaaatcataagcatcaacggggagcaatcgtttttgtttttcttttttaaaaaaagcaaatacccacacctgtggctgatatcgggaatgaaagaggggacatcactacagatcctacggtgaataaaaggctagtaagggaagatagagaacacagtctgggtgctggaggtgctcattgctcctgggttggtcatggctaacctccctaactcagatctttagacctataataggattgcaacctctgaggtcaggctgcctgtgtttgagtcccagcttgagcattttccagctaagtgatcttgggtaatttattgctgtcttcctgagcctcctttgccttgttaaaaaagcagagatgagccggcatggtggcacacacctgtaatcccaacaatttgggaggctgaggtgggtggatcacctgagctcaggagttcgagaccacccagggcaacatggtgaaacccatctctactaaaaatacaaaaaaaaattaactgggtgtggtggtgcatgcctctagtcccaactacttgggaggctgaggcaggagaatcccttgagccccagaggtgaaggctgcagtgagctgagattgtatcactgcactccagcttgggctacagagtgagactccatctccaaataaataaataaataaataaataaataaataaataaataaaaagaaagaaaagcaaagcaaagcagggatgataatagacctactttacagggttataaatgttaagtgagttagtacagtacctggcatgcagtgatcataaatgttgcattatttttcttgttaacacccaacagccctcatgacctgggtgcacccaggcaaccttctcagctccatttctcacccctcctctttgtgcccctgtgtctggccacctacccagatgtttcatggctcccagtacaccaggacctttcacatccccagacctttgcacgcaccgtcctctctgcctaaatccccttgtcttgcctgctcttcatggagcagctcaaaagtcaaccctgccctgagtcttactggtgctgtggtctgtttctcatgccctcctctggatgtctggcatgtgtctgggtccttactgggggccctgggtgggtaggggatgatctctggctcatttctgggtccacagtgcctgaagcatggagtgagtgatttcagtgaaaaggtgtcaaatgatggaagggagaagggaggaagaaatgaatgaagcgattaaggaatccgtttcttccaggcagcttctgcatccttcgccttgtccatctcttggtcttccactaccaccatcaatcccccttcttcaaccatgtcaccattaatctttctcctccttcagctggttcgctacgatctccctattttttttgaaatggagtgtcgctctgtcaagtgcagtggcgggatctcggctcactgcaacctctgcctcctgggttcaagtgattctcctgtctcagcctcccaagtagctgggactacaggtggccaccaccaggcctggctaattttttgtatgtttagtagagacaggattgcaccatattggtcaggctggtctcaaactcctgacctcaggtggtccacctgcctcagcctcccgaagtgctgggattacaggcatgagccactgtgcctggcctttttttttttttttttttttgagatggggtcttactctgtagcccaggctggagtgcagcggcatgatcatagctcactgcagcctgcagccttgaactcctgagctcaagcaatcctcctgcctcagcctcccaaagtgctaggactacaggcatgcaccaccatgcccagctaattattttttttgtagagatgggggtctcactattttacccaggctggtcttcaactactgacctcaagcaatcctcctacctcagcctcccaaaatactaggattacaggtgtgagccatcgcgcctggcccaattccattcttcctcctgccacctgccatccatgctctgtgaccacatatttgtgaccacaaatatctgtgctcctcctcctcctccacccatcctgtcacccagacagtctacactcagacccctttcttcctccttggctgggccgcctatgctcatgccctctccccctcccacaggcagctctccatctgcacgtctctccgtgaaccccgtgagcggtgtgcagccaccatgttcagctggctgaagcggggcggggcacggggccagcagcccgaggccatccgcacggtgacctcggccctcaaggagctgtaccgcacgaagctgctgccgctggaggagcactaccgctttggggccttccactcgccggccctggaggacgcagacttcgacggcaagcccatggtgctggtggccggccagtacagcacgggcaagaccagcttcatccagtacctgctggagcaggaggtgcccggctcccgcgtggggcctgagcccaccaccgactgctttgtggccgtcatgcacggggacactgagggcaccgtgcccggcaacgccctcgtcgtggacccggacaagcccttccgcaaactcaaccctttcggaaacaccttcctcaacaggtgtgccagccgcgagcccagggcgcatctttctttttctttttgttaagacagagtttccgctcttttcgcccaggctggagtgcagtggtgcgatctcagctcatggcaacctccacctcctgggttcaagcaattctcctgcctcagccacctgagtagctgggattacagacacccaccaccacgccaagcgagtttttgtattattaggtacagttggggtttcaccatgttggcctggctggtcttgaactcctggcctcaagtgatccacctgcctcagcctcccaaagtgttgggattacacgagtgagccactgcgcccggccctgggggcacgtctttctgtcccaggggtgcatcttgctgtcccccttctctgtcccctccctgactgtgtttccctccttctcagccccaattcccttctctctacccagttcttcccatgcctgtctctgctctcttatccaggggagcacctaggctagtgaagtcagtatgcctggttcaaatcccggccagctgggtggcctcaggcaaatgacttgacctctctgcccttcttgtagcctcatctgcaaaaatgtggatcaatcaccttgggccaggcccggtggctcacacctgtaatcccagcgctttgggaggccaaggcaggtagatcacttgaggccaggagttggagaccagcctggccaacatggtgaaaccccgtctctaccaaaaacacaaaaaattagctgggtgtggtggttcgtgcctgtaatcccagctactcgggaggctgaggcagaagaattgcttaaacctgggaggcggaggttgcagtaagccgagaccgtgccactgcattccagcctgggcaacagagcgagactctgtctaaaaaaaaaaaaaaaaaaaaagggatcaggatcaccatggtctctatgccatggttgctgtgaggacttggaatagcacctggtggccgggcgcagtgtctcacgcctgtaatcccagcactttgggaggctgaggcgggcagatcacttgaggccagaagtttgagaccagcctggccaacatggtgaaaccccgtctctactaaaaatacaaaaattagctgggtgaggtggtgcccacctgtaatcccagctactcgggaggcttaggcaggagaatcacttgaactcgggaggcggaggttgcagtgagctgagatagtgccattgcactccagcctgggcgacaacagcaaaactctgtctcaaaaaaaaaaaaaaaaaaaagaacagtacctggcacaaattaagtgctcactgaacatgagctgtggctggttataactctgagatggtcctggttgccctttttctgtccggtgtctttcttcgcccataaaggatgctttgccatgcggtcccgagtccctcttcatgttttcttcgtgttttccctccttctgtccttccctgttgacccctgaccctccctctgcccccaggttcatgtgtgcccagctccctaatcaggtcctggagagcatcagcatcatcgacaccccgggtatcctgtcgggtgccaagcagagagtgagccgcggtgagtggggccagaccctggggtctgagggaggaggggctggggcctggactcctgggtctgagggaggagggactgggcccggactcctgggtctgagggaggaggggctggggtctggactcctgggtctgagggaggaggggctggggtctggactcctggatctgagggaggaggggctgggcccagactcctgggtctgagggaggaggggctgggggcctggactcctgggtctgagggaggagggactggggtctggactcctgggtctgagggaggaggagctggggcctggactcctgggtctgagggagaggggctgggcctggactcctgggtctgaggtaggagggcctggggtctggactcctgggtctagaggaggaggggcggtgtctccgctgggacttgggcctgtgtcctctggccctggctggcggggcagccgcagggagctagtggaagctgtgactgctccatgctggctcgcattgatgggtgggggaggtgtgtgggtgaccacgtggtgggagcgggcaggagccgcacgtctgggcaggcaggaaggatgggaagggagagatgaagagggacagggattccgaggcagtgagacagcgacgcagggagacacaaggcctggagatgaggcagagcctgggcaggggaggcagagcccgggcaggggaggctgggccctgcgagctcctggctctgcgtctgggccacagatggggccgagaaggggatgggaagggaatctgggtgggggccaaggccaggcctggaatttataaacagctgtgcaaggagagtggcggggggtggattccagccggggcctccgggcgtgctgagccctcaccacccctgcccagcccagctcagcatctgtggtcccccagccccacagatctgtgtcccccaccccccatggccttggaggcccagaactggggcaaaggaggctgctatgtggggcagagaggatgggaggccctggcgagaaggctgggcctggggtggggtggggacgctgggggtgaccatgtctctggctgccgtccagaggccccacgggagaaaggcaggaggcagctgcagaaacgattgggaggacacgctgccagctgagggggaggaattcctggggctcccaccccagggcctggacctgggacagcgggagggagaggctctctcagccagggcaggggtgccggcaggggggttcaaaggccatgggtggtgggggagtggggaacggggtctccctccctggccttgaggatagaggaagaggaggagagagtgtccagctgttggtgtgtatatgtgtgtgtgtgtgtgtgtgtgtgactttgtgtatatcttgggaaagtgtgtcattatgagtgtactcctgggtgtggtggttccacgcatttgtgtatagcagtggacgtgcctcattgtggccatggctctgaggttgtatgactttgaattgtgtacatgcctctgtgtgtgtgtgtgtgtgtgcgcatgtgcctataattgtggctggaagactttgttttgtttgtttttgagacagagtctcactctgtcgcccaggctggagtggagtggcgcgatctcggctcactgcaacctttgcctcccgagttcaagtggctctgctgcctcagcctcctgagtagccaggactacaggcgcccgccgcacccatgtccggctaatttttgtatttttttttagtagagacgggatttcaccatgttggccaggctggtctcgaactcctgacctcaggtgatcctcctgccttggcctcccaaagtgctgggattacaggtgtgagccaccatgcccggcctgctggatgactttgtgtgactctgaagggctgtgtagggctatgagagactttgtgggatagtgtgcaactgattctgtccctatatactgttatattgtgacgtgtgtgtgtgagagagacagacataaagggcaacttttgtctatgtgtctatgtggatttagtgtgtatcattgtaggtgtgagtctgacattgtgtgcctgtgtgtgagatggtctaggcatatatgtgtatctgggctgtgggctgtgtgtgactttgtgtggctgcatggggcggtcagggctgcggggattttgtgggactgtgtgtgactacctgtgattgtatctccggatacagttgtgtgcttctgtgtggtgttgtgtatgtgagaatgtgtgtgtgtgcaggagtgcatcttttgtgtaactgtgtgtgattacgtctgtgtgtgtgcctttggatttgggagggcatgggaggttatgtgtgtgcgactgtgtctgtgtgggtgtgcatgcatgtgtgcctctgtacctgtgtgttcgtgcaggtctctgtgtctatgccgtgtgtgcatctcacattatctttgtgattgtgtgaccacaaacatctgtgtaggtcccagattgtgaacacgggtatgtctgggagcctgcatcttgtagtaattggctatgtttgtgtctggatgtgctactgggggtgtgtgtgtgtgtgtgtgtgtgtgtgtgtgtatgcgagctcatgtgtgtggctgcctctgcatgtaagatgtgtgaacacacgcatgtgtgattgtagcatagtaaagccctcaaatctgggctctgctacttttatttatttatgttatgctacttttttttttttgagatggagtcttactctgtcttccaggctggagtgcagtggtgcgacctcggctcgctgcaacctccgcctcctgggttcaagcaattctctgcctcagcctccggagtagctgggattacaggcgcctgccaccatgcccggctaatttttttgtatttttagtagagacggggtttcgccgtcttagccaggcaggtcttgaactcctgacctcgtgatccacccacctcggcctcccaaagtgttgggattacaggcatgagccaccgcccagcctattttctgctgcttttaaactgtgggaccttaggcaagccacttaacctctctttgcctcagttttcttacctgcaaaatgggaataatgggctgggcgcagtggttcacgcctgtaatcccagcagtttgagaggccaaggtgggcagattacctgaggtcaggagttcgagaccagcctgggcaacatggtgaaaccctgtctatactaaaaatacaaaaattagctgggtgtggtggtgcttgcctgtaatcccacctactcgggaggctgaggcagaagaattgcttgaacccaggaggtggaggttgcagtgagccgagctcatgacactgcactccagcctgggcgatagagtgagacttggtctcaaaaataaacaaacagaaaaacaaaacacacacacacacacacacacacacacacacacacacacacacacactgggaataataatactagcggcctcatagttgtcctaaaggttaaattagttaaaacatacaaagcacttagaaggtgcacacttgtgtgtgcacacagtaggcgctatggaagtgccaacaatgcctgttttcgctgggtgagtgccgttgtgggcccaaggttcctttttgccacgtctcccatcccacactgactcaacctctctcccttcttccctccccgccccatgagacacactttccgaatctgggccagtatgtgtgtttgtggagacaccgggagggagggggggctccagttgctgtccctccagtgacttggcccttcctcccccaaaacaacggcccccaaccccatcccggtccctgcgttgcccgcaaggaggctgcttcctctcaggcaggatgggtgcaagcaccagctccccggaggagcataggggcccatgggactcctcttctgtcgcctcttacctgtgtgtcttgagtaagtcccctaacttctctctctttttttttttttgagacggagtttcgctcttgttgcccaggctggagtgcagtggcaggaccttggctcactgcaacctccgcctcctgggttcaagtgattctcctgcctcagcctcccgaatagctgggattacaggtgcccaccaccacacccagctaatttttttgtatttttagtggagacggggtttcactatgttggtcaggctggtctcgaactcctgacctcaggtgatccacccgcctcagcctcccaaagtgctgggattgcaggcgtgagccaccacgcctagctagtcccctaacttctctgtgcctcagtttcctcatctggaaaatggggtcagaacagtgcccacctcctggggttgttgtgaagagtcactgagtgagctctagctggagggcatgaagtcagtaaatcagggctagctccttgttctgccagttaactcttcgtcctccgggttcccactctgccttccctcctcctggaagtcctccttgacccccaggctgggggttgggtcaggcactggccctgggctcccacagctccctggatccccctgcccaccctgggctgaccactcaggggccaggtctgtgtccccagtgggctgagagatgtaaggacaaagctgaaactgcctcagcctccacacacacagcagggaccacagagggtgcttcccagtgggtgacatcaccatgacttgctgagtgcttaccgtacatccagcactgtttttaaaaaaacagtttcattgaggattaacgtacacgccataaaaactcaaccattatggccgggctcagtggctcatgcctgtaatctcagcactttgggaggctgaggtgggcggataatgaggtcaagagatggagaccatcctggccaacatggtgaaaacccatctctactaaaaatacagaaattagctgggtgtggtggcacctgtaatcccagctactcgggaggctgaggcaggagaattgcttgaactcgagaggcagaggttgcagtgacctgagatcgcgccactgcactccaacctgggcgacagcgagactccgtctgaaaaaaaaaaaaaaaaaaaagctcaaccatttttttttttaaagagacaaggtcttgctctgtctgcaggctggagtgcaatgacgcaatcatggctcactgcagcctccaactgctgggctcaagtgatcctcttgcttcctcctcctgagtagctgagactacagatgcatgccaacatgtgtggataattttttattttatttttttctgtagagacagggtcttgtcatcttgcccaggctggtctcaaactcccaggctcaagcgatcctcctgcctctacctcccaaagtgctgggattacaggtgtgagccactctgtctggccacttccatcatttttaaatgtacagttcaatgccaggcattattttaagctctttatatatattagctcatttatattcttttaatcttcacaacagtctttttttttttttgagacagagtctcactctgtcgcccagactggagtgcagtgatgctatctcggctcactgcaacctctgcctcccaggctcaagcgattctcgtgcctcagccttctgaatatgtgggaccataggcatgagccaccaacaccgggctaatttttttgtatttttagggctaggctggtcttgaactcctggcctcaattgatctgcccacttcagcctcccaaagtgctgggattacaggtttgagccatcacacctggcttcacaacagtcctatgatttgcattttacagaaaagaaaacacaagttcagagaggttaagctacttgcctaaggtcacacagtggatgggggcagaggagggactcaactccaggtcttccagacagctaagtcagggggtctcaatcgcttctctctgctctcctcagcattgcttgttggtgaataaatgagtgaagaagcaaaggtgagaatgagtggatgaaggagtgaatgaggaaatgaatggtgaaaggaatgaatgaatgagcatgggaacccatggctgggatgggtgcttcataagagcaagaatcttgtctgtgtgttctctgcggtatcccaggctcccaggacagggcttggcacacatgagactctcagtaagtattgctaaataaatgcaaaatatttaacttctcagcctggccaacatggtgaaaccccgtctctactaaaaatacagaaattagccagggtggtggtgcatgcctgtaatcccagctactcgggaggctgaggcaggagaattgcttgaacctgggaggtggaggtggaggttgcagtgagccacattcatgccactgcactccagcctgggcgacagagtgagactctgtctcaaaaaaaaaaaaaaaaaaaaaaaaaaaaaaaaaaaaaattatcatctgctatggcaagagcacagctatccagcatgaactctagttgctggatcgtggggagatacaacaggtcctggggaggagctggggtgatagaggcatgtggcaggcttgggggttccatagaagcacagggggatctcttagcaaacatgtcagtatttttaacaacctatatgtacataccgacgcacacctgtaataactgcttaatgaatgagcaaatgaaaaaatggaggccgtgaggctgggcgcggtggcccacgcctgtaatcccaacattttggaggctgaggcaggaggatcagttgagctcaggagtttgagactagcccggcagcccgggtaacatagtgagatcccatctctactcaaaaaaaaaaaaaaaaaaaaaaattagccaggtgtggtgatgcgcgcctgcagtcccagctactagggaggctgaggtgggaggatcacctgagctccgggaagcagaggttgcagggaggcgtgatcccgccattgtgctcgagcaaaggaaaagggggatgattgccccctgtagccagatggcttgaggggctggggccagagcgaggggggaaattctgggcactggagagccagagcagtagtgcccactgagggccttggctattttgcccagacaggatttggacagccaacaacgtgaacatctttacagtccaatatgcaagagaatgggatactactgagaatggctggagggtgggggtctgatttctgccccttgcgcccctgtctctccactcccactccaggctacgacttcccggccgtgctgcgctggttcgcggagcgcgtggacctcatcatcctgctctttgatgcgcacaagctggagatctcggacgagttctcagaggccatcggcgcgttgcggggccatgaggacaagatccgcgtggtgctcaacaaggccgacatggtggagacgcagcagctgatgcgcgtctacggcgcgctcatgtgggcgctgggcaaggtggtgggcacgcccgaggtgctgcgcgtctacatcggctccttctggtcccagcccctcctcgtgcccgacaaccggcgcctcttcgagctggaggagcaggacctcttccgcgacatccagggcctgccccggcacgcagccttgcgcaagctcaacgacctggtgaagagggcccggctggtgcgagtgagtagtcctgagggctgggcgcgcattcttggaggaggtttcctcggtcctctcctaccagtgctgtgagtccctgacttatcagggcccaggttagttagttctcttgaagttgggtcattctggcacagagtgaagccgggaggaagaactgtatggagagactcattcctctgcctttggatttctgtgtcaactccgtgtcaccctggcttctctgtcctggtatttctatttcttcttcctcttcctcctcctcctccttctcttcttcttcttcctctttttcttctttcttctctctttcctcctcctcctcttcttctccctcctcctcctccttcttctctttcttcctccccttcctccttccttccttccttcctctgttcctctctcccttcctccctcctcccttcctccttccttacatcctctttcgttccctcttcttccttcttttttaagagatggagtctcgctctcttgccctggctggaatgcaatgatgcaatcacagctcaccacagccttgaactcctgggctcaagtgatccttcctccttagcctgccccaagtagctgagaccacaggcacgtgtcaccacgcccagctaattttttattttttgtagagtcgaggtcttactgtgttgcccaggctggtcttgaactcctgccctcaagtgatcctccccttttggcctcccaaagtgctgggattgcaggcatgagtatgttgaatttttgaacttcctataaaatatagacagacaaatactcattattctaccctctttattttttgataatttataagattgtggttcaaaggtttccaagttcattggtttattccacaaatatttctttttcttcttcttttctttttttgagacggagttttgctcttattgcccaggctggagtgcaatggcgtgatctcggctcaccacaacctccgcctcctgaattcaagcgattctcctgcctcagcctcccgagtagctgggattacaggcattcaccaccatgcccggctaattgtgtatttttagtagagtatttttagttggtcaggctggtcttgaactctcaacctcaggtgatccgctctccttggcctcccaaagtgctgggattataggcgtgagccaccgcgccaggcccacaagtatttctggaatgctttctgtacacatggtgctggggctggggatggagggaacagacaaggttccagccctcctggggctcatctttttttaaatttaattaattaatttatttataagctagtcaaatttagcagtgggggtggggagttgcatgccaactttactgacactaataagttctgataaccaaggccaggtgcggtggctcacgcctgtaatcccaacacttttggaggattgcttgagcccaggcattgaagaccagcttgggcaacatagtgagacaccatttctattaaaaaaaaaaaaaaaagttctgataacccactaccattggaccagccccggggcttatcttttgatggagggagacagaataagtaaacagacataaaataacaatgaaggctgggtgcggtggctcacgcctgtaatcccaacactttgggaggccgaggggggagcagatcacttgaggtcaggagttcgagaccagcctggtcaagatggtgaaactgcgtctctactaaaaatacaaaaattagccaggtgtggtggcgggcacctgtaatcccagctacttgggaggctgaggcatgagaatcacttgaacccgggaggcagaggttgcagtgagctgagattgtaccactgcactccagcctaggcgacagaacgagactctgtctcaaaataaaaaaaaaaaaaaagatgaatttattacatcttaggcgcttcacagcacccgtctcccatgactcttgtttgattgtggccacagattgtccccttctctcactcctttcctctgtcctcatctcccattcccttcccagcgtcccctgcacttcacgctggtggcctcagtcctgtgcacttgctgctccctcttcctggaaacctcttctgccttcttccccctcccacctggccatccacaaggctcactccctcctcacccctttcaagactctgctcaaatgctcccttctcaggaaggctgtccatgccctcctttgaatgaatataacttcccccatatgcgtccttctttaccctaaccctgttgtcctttcctttcctttcttctcctctcctctcctttctctctttctctgtttctctttctctctttctttctctttctctttctttttctttctttctttttttttttttttgagacagggtctccctctgttgcccaggctggagtgcagtggtgcgatatcagctcactgcaacctccacctcccgggttcaagcgattctcctgcctcagcctcctgagtagctggggttacaggcgtgtgccaccacacccagctaattttttgtatttttagtggagacggggtttcaccatattggtcaggctggtctcgaactcccgacctcaggtgatccgcccgccttggcctcccaaagtgctgggattacaggcgtaagccaccacacccagccaatcagggctctttgaattccttcactgatttatccccagtgcccggaacagaattggtgctctgtaaatatttattgaatgaatgacattgaacaaacagttgcattgaacaaaatctcctctatgcctggcctggtgttgggtggtgcaggagacacaacagtgaccacgatggttccagtcctgtcctgctggggctcccagtcctaaataatgaaggcagttccagggctcagtcctcactggggctcctggagaggagacagatccatccccaggcaccgatgacccagtgtggtcagagctggggcggggtagctggggcaggcagagagggcttctttggaggagagggcatctgaggggaaatgtcagtgttgaacccagtgtagacagtgtgctaactcaattagaggctgaggatgtggctgagatcagaggtggtgtgggctgtgtccgggaatctgtgctttgtccctagggcactggggagccatgaaaaagttcggagcagggaaaggagataattagactcaagctaccttttggagggtggattcaaggcaggagagtctaggagcctggagaccaggcaaaaggcttggaggttcctggatcaggacaggccttggggagggagaggagaaaggagagcgcgggtttcagagcgattttggatgtcagatggaactttctcagggggaggctgccagggtggaggcggggcaggaagctgggcaggcagggaggccaagaaggttctagggggtggaggagcctgaggtgttggtttaaggagcagcgagagtgggtgagtcagagcccccacccccaccccaggaatcctccttcggagggagcggcccactgtggaccaggctgccactcctggaaccttcggaattcaccttgcgctcctctgcccaggcggctctgcagtgtctctctctctctttttctgtctctatgtcagtctcctttctacctctctctcagtctctttcttctccatttttactttttcttttattctaactccctttccttttctttctcgctctgcctcctcctgtctctccatctctcccccgctccgccgccgccctctctctgtcttcctcctggtcttgcttagactcccccaggttcgttcccgcgggtcccttggcgggagctggagcacaaggcccagggacagaggggtgggtccgggccagacacctggtgcccccgccgggctgggggcggctccggaaacccagacaaaccccggagtcagggacccagccccggcccagcccgccctctcaccttatctcttcctggcaccttcccctgcttcctctctggaaaagccatcagcgccctcccgcctaccctcctttggtccctacggagccgcccttcggccctgccccctggctccattggcccgctctcacaggccccgcccccagcccggccacacccctgccctgattggtccttcagaccattaggcactccctccccctcttcctgcaggttcatccatggctccccagtgccgttcaggacacaggagcatgggatttagggtccgctgtgaccaaggctcactgcccctcctttgccccgtgtcgcacccccacccctgctcctcacatatgagtccgccacacttggtcgtcaccaacaatagccatactgttaacctcccctcatgctctcctccaaagataccaggccttcctggactctctgggaggaggcattcaccctcctcccagtgcctcagtttcccatctgtacgatggagggtgtggacgaatcctctggctctaagtcctttggctgaagtgatagctgttagaaggggagattttatgatgctgtgatacgtaaggccaagatcttgggagggtctgattctatagacgccaagatgccctgaaccttcagaccacattctctgcagtggcccagtgacattcattcagcagttgccgatcgcatgtggtactcctctaggctctggggatacagcagggaacacagataaattccttttctcatagaattactttttagtggggaagcaaacattaaacaaatcaatggttatgaagaaaaatgaagcggaggaaagaggggctggcgagggactattttagagcgctctgaaggagaggaaggggtaagaggaaggggtgagccgagtggcgatcgggtggaagagcagtccatgcagtgagaacagcatgtgcaaaggccctggggcagccatgcacttgatgtgtttgaactgagagcctaacggggctggagacagggtggtggtggaaggtggaagagatgaagatttagaaccagtcagggaccaccaacgttctcagcagtctaaatttgtgattctttaaaaaaaaaaaaatatatatatatatatatatatacatatatatataatttttttttttttagatggagtctctctctatcacccaggctggagagcagtggcatgatctcggctcactgcaacctctgcctcccaggttaaagtgattcttgtgcctcagctttccgagtagctgggactccaggcaggtgccaccacacctggctaatttttgtatttttagtagagatgggttctcaccatgttggccaggctggtctcgaactcctgacctcaggtgatccgctggcctcggcctcccgaagtgttgggattacaggcatgagccactgtgcctggcctaaaagaattttttaactagtcttttttattgaacatttaagaccatctcatggaaaggcattcatactttatcagacatgattctcccacacctcaccccaccagctcccagggcctcttttctagaggcaacccccataagtagtttcttgtgtgtctttccagatatactgcattttttttttttttttttttgagacggagtctcgctctgtcgcctaggctggagtgcagtggcatgatctcggctcactgcaagctccgcctcccgggttcacgccattctcctgcctcagcctcccgagtagctgggactacaggtgcctgccaccacgcctggctaattttttgtatttttagtagaggcggggtttcactgtgttagccaggatggtctcgatctcctgacctcatgatccgcctgcctctgcctcccaaagtgctgggattacaggcgtgatatactgtaatcacgcccggccaatatactgcattttgtaaaagcatttatttattattattttgttttgagactgagtctcactctgtcgcccaggctggtgcaatggcacggtctcagctcactgcaacctccacctcccaggttcaagtgattctcctgcctcagcttcccatgtagcttggattataggtgggcaccatcagcccggctaatttttgtatttttagtagagatagcatttcaccatgttgtccaggctggtctctaactcctgacctcaggtgatcgacccgcttcagcctcccaaagtgctgggattacaggcgtgagccaccgcgcctggcctatttattcatttttttagagacaaaggctcgctgtgtcgcccagactggagtgcagtggcgacatcatagctcacttcagtctcaaacctctgggctcaagtgatcctccctcctcagccccggcaattcactgggactataggcgcgcgccagtacacccaactagttttaaaatttttttttagagaccaagtcttgctatgttgcccaggctggtctcgaacttctggcctcaagtgatcctccccccttggcttcccaaagtgctgggattataggcatgagcaatatttaatttgtgagcttcctataaaatatagacataccaatattcattattctgctctccttgtttatttttcgataatttataagattgtggaccaggtgtggtggctcacacctgtaatcccagcactttgggggaccaatgtgggcggatcatctgagatcaggagttcaagaccagcctgaccaacatggagaaatcccatctctactaaaaatataaaattagctgggcatggtggtgcatgcctgtgatcccagctactcaggaggctgaggcaggagaatcgcttgaacccaggaggcagaggttgcagtgagacaagatcgcaccactgcactccagcctgggcaacagagtgaaaccccatctcaaaaaaaaaataaaaaataaaaaataaaaagattgtgtttcaaaggttctcaagttcattggtttattccacaaatatttcctgagtgttttctgtacagattgtactggtgctggagatggagggaacagacaagtttccagcccttctggggctcctttttttttttttgagacagtgtcttgctctgtcacccaggctggagtgcagtggtatgatcatggctcactgtagccttgacctccccggcttcagtgatcctcccatctcagcctcttgagaagagaagattaataaatcaagacattaggccaggcgcggtggttcatgcctataatctcagcactttggaagactgaggcgggcggatcacaaggtcaagagatcgagaccatcctggccaacatggtggaacccagtctctactaaaaatacaaaaattatcatggtggcgggcgcctgtagtcccagctacttgggaggctgaggcaggagaatggcgtgaacccgggaggtggagcttgcagtgagccgagattgagccactgcactccagcctgggcggcagagtgagactctgtctcaaaaaataaataaataaataaataaataaagtcattatttgcaccactgcactccagtctgggtgacagagcaagactctgtctcaaaaaaaaaaaaaaaaaaaaaaaatccactgtccatttgggagaaaaaaagagtgaagaaagcaaaaagcgaataacgtcttagtattgttcttaaaataattttgaccacaggaacccccgaaaggatcttgaggacccctgggtttccctggaccacacttcgtgaattgctgctgtagggctttgtcggcttcggtagaaattttgaacttcaataagcaaatagagagttatgagcagcatcccctgggctcatgttccttcctgaaaaatgccctcttgggccactgctgcatggagcaagggttattggggcaggatggggagctgggagacctgtcgggccaccttgggtgtctccccaggcaagagaggatgacgctcgaatggacatggtggccactgaggtggagagaaatgagaagcaggggagaggctgggcgtagtagcgggtgcctgtagtcccagctactcaggaggctgaggtgggaggatggattgagctgggaaggtggaggttgcactgagccgagattgtgccactgcactccagcctgggggacagagccagaccctgtctaaaaaaagcaaaaaagaaaaggaaagtaggggagagagggagagacataggaggaggcaaaagggactcattgataggttggatgtggctacttaacaggaggaagaatcaaatatcaaatcaataatgatttcaagagctgggtaccgtggctcccgcctgtaatccagcactttgggaggctgaggcaggcagatcatttgaggtcaggagtttgagaccagcctggccaacatggtgaaaacccctctctactaaaaatacaaaaattagtggtggcgggcacctgtaatcccagctactcgagaggtagaggcaggaggattgcttgaacccaggaagtggaggttgcagtgagccaagatcatgccattgcactccaccctgggcaacagagtgagactccctttcaaaaagaaaaaaaaagtgatttctagagccggacggggtggctcccgcctgtcatcccagcactttgggaggccgaggcgggtggatctcttgaggtcaggggttcgagaccagtctggccaacatggtgaaagccagtctctactaaacatacaaaaattgaccaggcatggtggcacgtgcctgtaatcccagctactcgggaggccagggcaggaggattgcttgaacccggaggtggaggttgcagtgagacaaggttgcgccactgtcctccagcctgggtgacagagtgagtgagactccgtctcaaaataaataaataaataaaaataaaatttctagatttctggcctcaactgggaaggcagggctggggatgcccttttcagagatgggcacagctgagggcgacacagctctgagggctaggctcaaattccacttagggcatcctggtatggagctatccaggaatgttgacagggcaattagctctgagtcctgagctggagggagaggcttaggctggtatgcagattcgggagtggacctcttggaggggtgtttaaaactgggagggactcagctcacttagttagcagagaggaggagcccagggtgagccccagcaggaggaggccatgaggctcacagtgtggcacctccgcctgcagcacctgtaacttgtcagaaatgcaaattcccatctgggcagtggctcttgcctgtaatcccagctacttgagaggctgaggcgggaggatcccttgagcccaggaatttgaggctgcagtaagttatgatcgcaccactgcactcctggctgggtgatagagcgagaccctgtctccaaaaaaaaaagaaaaaaaagcaggccaggcgcggtggctcatgcctgtaatcccagcactttgggaggccacggcgggtggatcacctgagattaggagttcaagaccagcctggccaacatggagaaaccccgtttctattaaaaatacaaaaaaattagccgggtgtggtggcgcatgcctgttaatcccaactacttgggaggctgaggcagaagaattgcttgaacccaggagttggaggttgcagcgagctgattgcaccactgcactccagcctgggcaacagagcgagactctgtctcgaaaaaaaaaaagactgggcacggtggctcacacctgtaatcccagcactttgggaggccaaggtgggcagatcacgaggtcaggagtttgagaccagcctgaccagcatggtgaaaccccatctttactaaaaatacaaaaattagctgggcatagtggcgcatgcctgtaatcccagctactcaggagcctgagacaggagaattgcttgaagccgggaggcggaggttgcagtgagccgagattgtgctactgcactccagcctcggtgacagagcgagactccgtctcaaagaaaaaaaaagagagagagagagagaaaaagaaataaaagaaatacaaattctcatgccccagcccagaccaagtaaatcagaatctctgggagtggggcctgcagcctgtgttttaacaagctccctggtggaccctgatgcaggctgaggtgagaacccttcccacaggttcacgcttacatcatcagctacctgaagaaggagatgccctctgtgtttgggaaggagaacaagaagaagcagctgatcctcaaactgcccgtcatctttgcgaagattcagctggaacatcacatctcccctggggactttcctgattgccagaaaatgcaggtgggaagctgcccaggagggaatgttgggggtgggtgatgggaaggttggtttctggaagctctgagatgggacctcaaaagccagagggatggatggcaggttctggaaagcgcctccctcaaatagttccgtgggagcatggttttatgagtcaggctaggggagtgaagagaaaacccaaaataacagtggctaaattaagatagagagtttttctttctttcctccataaaaagtcccagaaagtgatccaggactggtttggtgctttacagagccagggatctagtccccttctgtcttatttctcttccatgcctggcctccaggcccaaggaacttcatggtacaaaagggctgtgaaggctccagccattgtgtctgcgttccagccagcaagaagttgggaagggggccaggcatggtggctcacgcctgtaatcccagcactttgggaggccgaggcgggcggatcacgaggtcagcagatcaagaccatcctggctaacacggtgaaaccccgtctctactaaaaatacaaaaaattagctgggtgtggtggtgggcgcctgtagtcccagctactcgggaggctgaggcaggagaatggtgtgaacccgggaggcggagcttgcactgagccaagatagcgccactttactccggcctaggcaaaaagagcgagactccgtctcaaaaaaaaaaaaaaaaagaaaaggaagttgggaaggggaagaaaagagtagtctctttaagaacactgtttattttattttcatttatttatttgagacttaaatatttatatttgtaaaatataaatatttaaaatatacacagctgggtgcagtggctcatgcctgtaatcccagcactgtgggaggccaaggcgggtggatcacctgaggtcaggagttcgagaccagcctggccaacatggtgaaaccccgtctgtactaaaaatacaaaaattagctgggcatggtgttgcgtgcctgtagtcccagctactggggaggccgaggcaggagaatcccttgaacccgggaggcagaggttgcagtgagctgagatcacaccactgcaatccagcctgtgtgaccgagtaagattctgtctcaataaataaataaataaaataaaatatatacgtttaaaaatttatttatatattttttagagatttatttatatatttttcagagactctgttgtccaggctggagtgcaatggggtgatcatagctcactgtgtacttgaactcctgggctcaaaggtccttctgcctagcctctagagtagctgggactacaggcacatgccaccatgcctggctagcttttttttttttttttttttttgagacagagtctcactctgtcacccagaccgaactgcagaggcgtgatcttggctcactgcaacctctgcctcctgggttcaagcagttatctcacctcagcctcccaagtagctgggcctgcaggcatgtgccaccacgtacagataatttttcatacttttagtagagatggggttttgtcatgttggccaggctggtctcgaactcctggcctcaagtgatcctcctgccttggcctcccaaagtgctgggattataggcaggagccaccatgcctgaccaagaacactttctagaacagagctgtccagcagtacgttctacaatgatggaaatgtttcattctgcactgtccagtatggtagccactagccacattcaaatggaatgttaacgtgtatttcttttttctttttttttgagatggagtcttgctctgttgcccaggttggaatgcagtggcaagatcttgactcactacaacctctgcctcccgggttcaagcaattatcctgcctcagcctcccaagtagctgagattacaggcatccgccaccacgcccagctaattttgtatttttggtagagatggggtttcaccatgttgtccaggctggtctcaaactcctgacttcaggtgatcctcctgccttagcctcccaaagtgctgggattgcaggcatgagccactgcgcccggcctgtatttcattttaattaatgtaaataagcacatgtggctagtggctgccatactggacaggctaacagtagaagctgcacatgcaacctgtgcttgcctcagtggacttgaacttagtcatactctggctgccagggaatccaggttgcaacctaggatccccaacccttcagagtcgtgatcagctggcctctctgccttggctcaggaaattcacatagggctgtgaaaggaatccattttcgcagagactgtcctggtgcagtctgggccacttagagtagcccgtgtgagaagcagtgtgacgccaagtccacccctacaccccaaagtgacttcttcggtggggagggggtggtcccaggaacccctgatgatctgatcatctcaaatctcacctccaaatttggcagccagccactcagtcctttctgtgtggtgtggtagcactgtgacaggaattaagctttcttaactttcttttttctctccccccctgcacacttttttgttttgagacagggtcttgctctgtcacccaggctggagtacagtgtggtgctatcttcgctcactgcaacctctgtctcctggggttcaagagattctgtctcagcctcccaaagtagttgggactgcaggcgtgcaccaccacacctggctaatttttaatttttttttttttttttttttttttttaagaaatagggttttgaggccaggtgcagtggctcatgcctgtaatcccagcactttgggaggccgaggtgggcagattgcctgaggtcaggagttcgagaccagcctggccaacatggcgaaaccccatctctactaaaaatatgaaaatcagctgggcatggtggtaggcgcctgtaatcccagctacttgggagtctgagccaggagaatcgcttgaacccatgagacggaggttgcggtgagctgagatcgcgccattgcactccagcctgggtgacagagcgaaactcgtcaaaaaaaaaaaaaaaaaaaggaaagaaaagaaaagaaatagggttttgccatgttgtccaggctggtcttgcactcctgggctcaagtgattctcccacctcagcctcccaaagtgctgggattacaagtgtgagccacccaagcctgctgagtttttttttttttaacttttaatgttgtacgtgctggctgggcagctggagttgggtagagggcggttagggttctaggctggtgtggatgctctgagaaagctatacttgatgcgaaaatattgaaatccttctctgctagctggcaaagggccgctgctctcactcatcagaggggccccagcctccccaccctccagtaattctggggcacaggagaaagcctctgggaccttgttgcccaagtatcttctcattggtgggtgcccgagcggaacaggttgttcagatgttcaaatacttctgcatgtgtcagtaaagagctgccactctggctgggtacagtggctcacacctgcaatcccagcactttaggaggttgcggtgggaggatggcttgagctcaggagttcgagaccagcctgggcaacatagcaagacttggtctctacaaaaaatttttaaaactagttgggcgtagtggcgcacacctatagtcccagcgaattgcgggggctgaggagggaggatcacaaaaatttagctgggtgggtggtgtgtgcctgtggtcccagctacttgggagactgaggccagaggatcgtttgaggctgggagttggaagctgcagtgagctatgttggcaccactgcactctagcctaagtgacagagcgagaccctgtcaaaaaaaaacaaaacaaaacaaaacaaaaatggctgggcgcggtggctcatgcctgtaatcccagcattgggaggctgaggcgggcgaatcatgaggtcaggagttcgagaccagcctggccaacatggtgaaacgctgtctctattaaaattacaaaaattagctgggcatggtggcgcatgcctgtaatcccagctacttgggaggctgaggcaggagaatcgcttgaaaccggaaggcggacgttgcagtgagccgagattgtgccatttgcactccagcctgggcaacaagagcaagactctgtctcaaaacaaacaacagtaaaaaaaccccacaacagctacccccgagcttctccagtgtcctgataccaccttgcagcctgagggcctcagggatggcgccgcttgaattctgggtgcccctgtcccccaccacaggagctgctgatggcgcacgacttcaccaagtttcactcgctgaagccgaagctgctagaggcactggacgagatgctgacgcacgacatcgccaagctcatgcccctgctgcggcaggaggagctggagagcaccgaggtgggcgtgcaggggggcgcttttgagggcacccacatgggcccgtttgtggagcggggacctgacgaggccatggaggacggcgaggagggctcggacgacgaggccgagtgggtggtgaccaaggacaagtccaaatacgacgagatcttctacaacctggcgcctgccgacggcaagctgagcggctccaaggccaagacctggatggtggggaccaagctccccaactcagtgctggggcgcatctggaagctcagcgatgtggaccgcgacggcatgctggatgatgaggagttcgcgctggccagccacctcatcgaggccaagctggaaggccacgggctgcccgccaacctgccccgtcgcctggtgccaccctccaagcgacgccacaagggctccgccgagtgagccggcccccctcccatggccctgctgtggctccccagctccagtcggctgcacgcacacccctgctccggctcacacacgccctgcctgccctccctgcccagctgtaaggaccgggggtctccctcctcactaccgccagacaccccggtggaagcatttagaggggaccacgggagggacaaggcttctctgtccgcccttcacacctccagcctcacgttcacttaggcacatcacacacacactggcacacgcaggcatccatccatccgtcattcattcaaatatttattgagcacctactatgtgcccagccctgttctaggcactgggcattaccatagagaacaaaatagacaaatacatctgccctcatggaaggtgacgttcccaggagagggcacctacacagtcacgcaaacacacactaattcctggcagggcccccagcccctcccctggctgagcagccctgtggctgaaatgactagcagataaacagacccccttctgctccgcttcctcctgcccagccaggcaacaccctcaaccggctccatcacatcctcaggtctcgggaccatggggggctcagaggggagacacacctactgcttcctcagatgggcccctccgcagccccttcccttgctcggggaaagcccccaattctgcccacacccatttatttccttccttccttccttcttttctttccttccttccttcttttttgtttttgcccccaattctgcccatacccatttctttctttccttccttccttcttttttgtttttgcccccagttctgtccacaccccttccctttcctgtcctgtcctttctttcttttttgatagaatcttgctctgtcgcccaggctggagtgcagtggtgagatctcagctcactgcaacctccacctcctgggttgaagtgattctcgtgcctcagcctcctgagtagctgggactgcaggcacgcgccaccacgcccagctaatttttgtatttgagtagagacggggtttcaccatgttggccaggctggtctcgaactccgcatctcaggtgatctgctcgccttggcctcccaaagtgatgggattacaggcatgagccaccgtgcccggcttcacacccatttctttaaaaaggatcccgtagcaggcagaaaagccccttccatcctgctcctctgatactgtgcccccttggagatatttccgtcctccacccacgtgtctgtggctggaactgcccagcctgctcctggccccctggaagcctccccacagctggtaatctggacttaaggattgctgggccaccgcctctctgcctaccaccattccatatttaagtggagcccctacgtagaaaggccccggggctttattttagtctccttttcagggatgtcgtgggcgggggagggggttcttggtgctacagccctctccccacccctaaagggacgccgacgctgtttgctgccttcaccacatattagtgcttgaccctggcaggggaccccatggaaaagatggggaagagcaaaatacatggagacgacgcaccctccaggatgctcgctgggattcccacgcccaccactgtcccccaccccatggctgggaggggcctctgaacggaacagtgtccccacagagcgaataaagccaaggcttcttcccatgtggcagtgaggctggcttgggacagggatcgcccgccctcccccagggaaagagagacctgggcaggatttggggtggggggaggcccccttccgtgctctcaggggcggggtggagtccgtgactcaatgcagcgaggcctggtgactcaggcctgggctgggggccagaacggcatattttccgaggaaaagtgactctggggccctccccccgggacatcccttcctcccacctcccgcggcgggggcctgggaaccaagccctggggcgcgcgcggggtgtgtgtgtgtgtgtgtgtgtgtgtgtgtgtgtgtgtgtattcgggcacgaagtgctctcccagctcccgccctgcccggcaacgtgcccttgcacaacctgggtacataactcccgacgcgtaacaccaggaacacgctggtttctggttggggaagtggtgaccttgcccacacgggctgccaggagtgtgcgcgcgctcacgcaccggggactcttggccagagctgggcagcgcaccgtgcgcgccgagtcccgcgcactcacatccaggccacacccacggcgtcccgggacacgctggccgcgcactcatcccgcccacgcgggcccagtttcgcggctcgcggcgccccctggcggacgctcagaaaacagataggctgtggtcgccaaaatccctgcccaggtgattcggcgctcaggtctcggggctgcgatccagggcctgtcacctttagggcctgtcacctttccaacgctctgcgcaaggatccagttgaatttcgctgtgtgaccatgcgtgtgtcgcctgccctctctgtgcctttttcctttatgagtccagagtggcttttatgaggcctggattcctttgatttgattgttttgtttttgagacagggtcttgctctgtcacccaggctggagtgcaatggtgcaatcacggctcactgcaccctccaactcctgggctcaagcgatcctcccacctcagcctcccgagtacctgggactacaggcgcacaccatcacgcctggctaatttttaaatttttggcagacacaggatctcactatgttgcccaggctggtcttgaattcctgggctcaagcgatcctcctgcatcggcctcccaaagtgctgggattagaggcgtgaatcaccacgccctgccatggatccctttgaatggctgccagggcccaagagcctctgagcttccttccttatttgtaaatgacaaagatgagttgattctaagatgaagcctcagagggcaaggcagtaacaatagctaacactcagatgccagacgcagccttaagcgctttacatatgtttaatcttctgcatgacttatgacgcagatgtactgttatcatctttattttacagatgaggaaactgaggcacagtgaagtagcccgctcaagatgaatgattctgagtctgcacttctagggtcctaaaagtgtatgtttctaacattcctctaatgttctgtgcttccaactttgatattccgaaagttacttgatttctaagatcctaggattggaacatttgagaggacaaaacttctgagattggaatgtgtgttgtgcggaatctgccactgacggttctgactttctaagaaaacgagattaaaaaataatcaggccgagcatggtggctcacatctgtaatcctagcattttcggaggctgaggagggagaatcacttgagcccaggggttcaagaccagcctggacaacatagtgagacctttgtctcttaaaaaaaaacacacacacatcagtttggaccgggagtggtggtgtgagcctgtaatcccagcgctttgggaggcctaggaaggaggatcacttgaaaccagatgtttgagaccagcctgggcaacatggggaggctccatttctacaaaaaataaaaataaaaaattagccaggtgcggatgcacccttctgtggtcgcagctactcgggaggctgaggtaggagaatccctgagcttaggagttggaggctgcagtgagccattacccttccactgcactccagcctgggggcaacaaagtgagaccttatctattaaagaaaaaaatcagtttgagcaaagaccccaggcggccgggaaaggtgttcgcttaagggcgaaagctaagaacctgcaaccttcccgtctctttcctaccacccgccgccgttaggaatcttcagatcccgctgtaaagaatggaggaaggaggagccatttatcctttaccaagatggcagcctcctggcaactccagtcactttataaatatggctgccacaggaagtacgtcacggaagagggtgggaaatctgcgcgcgcacgctgcaaaggggctttttgggacgccagtggctgagttcttcctttgacaagatggcggcaggaggcagtggcgttggtgggaagcgcagctcgaaaagcgatgccgattctggtttcctggggctgcggcccacttcggtggacccagcgctgaggcggcggcggcgaggcccaagaaataagaagcggggctggcggcggcttgctcaggagccgctggggctggaggttgaccagttcctggaagacgtgcggctacaggagcgcacgagcgggtacgttgggcgggacttccgggaggtgggacggttcctgcgcccaggtgcaaggccaggcgtgcttgcgtggactcgtcgggggtcgggggtcgggggtcgggggttgggggctcctgtcccggggaccgccgaggaaatggagagcatgggcaggggactcagcatgggaagctggagagcttgatagagttaccagatttagcagataaatatacaggacgctcaattaaatttggattttaggtaaacaatgaataatttttagcataaatacgttccatgcatccaccttagcttgctgttttctaaatatgtgtgtgtgtgtatgtatatatgtgtgtgtatatatatgtgtatatgtgtgtatatatatatgtgtatatgtgtgtgtgtatatatatgtatatatatatgtttttcagacggagtctcgctctatcgcccaggctggagtaggcgcgatctcagctcaccgcaacctccgcctcccaggctcaagcgattctcctgcctcagctccttagtagctgggattacaggcgggcgccaccacgctcggctatttttcttttcttttcttttttcttttttttttgagacggagtctttctctgtagtccaggctggagtgcaatggcacgatctcggctcactgcaacctctgcctcctgggttcaagtgattctcctgcttcagcctcccaagtagctgggattacaggcatgcaccaccacgtccggctaatttttgtatttttagtagagacagggttttgccatgttacaggccaggctggtcttgaactcctgaccttaggtgatccacccgccccggccccctaaggtgctaagattacaggtgtgagccaccacacccagcctaatttttgtatttttagtaaaggcagggtttcaccatgttggccaggctgctcttgaactcctgacctcaggtgagccacccgcctgggcctcccaaagtgctgggattacaggcgtgagccactgcgcctggcagtccttcctaaatactaagttctgtaaactgctgggcgaagccttagcctggaagagtccggtggcgggacttgactaagcggaagatgaaggctggacctgccaggttaaatctctttcctctccaacatctctggctgatgttctgcatttctgtcccccagtggcttgttgtcagaggccccaaatgaaaaactcttcttcgtggacactggctccaaggaaaaaggtgaggagaggcttttgtggtgtggaatggcggttattcattgttagtcagcttacggtagcctctgagatctgtgttaatgatgtggcttggaaggcaaatatctgcggaaacaggtcaaccttaatataaacaaggggacctcaaatgggcagaaagcaagctggagacgaacttagagaaggcaggtttttcttttgagatgtcagtgatctccatgcacagataagctgctgggagtctgccttgatgaataagttagaaacacattaaaggatctctttttagcttgcagaaaagcaagtcaaggacctgcttaactcagtcctgccggttgcggtgagtcacgcctgtattcccagtactttgggaggctcaggcaggcagatcacctgaggtcaggagttcgagaccagcctggccaagatggtgaaaccccgtctctgctaaaaatacaaaaattagccagttgtggtggcgggcacctgtaatcccagctacttgggaggctgaggcaggagaatcacttgaacctgggaggtggaggttgcagtgagccgagatcgcgccgctgaactccagcctgggattactattatttttttgagacagtgttgcgctgtcatccaggctggagtacagtggtgtgatctcagttcaagcgattctcctgcctcagcctcccaagtagctgggactgcaggctgcaccatcaagcctggctaatttcttttcttttctctctctctttttttttttttttttttttttttgagatggagtttcaagcccaggctggagtgcaatggcgtgatctcagctcaccgcaacctccacctcccaggttcaagcgattctcctgcctcagcctcctgagtagctggggttacaggcatgtgccaccatgcccggctaattttgtatttttagtagagatggggtttctctatgttggtcaggctggtctcgaactcctgacctcaggtgatccgcccgcctcggcctcccaaagtgctgggattacaggcatgagccaccacgcctggtcaagcctggctaatttctgtatttttagtagagatgggtcttcatcatgtcagctaggctggtctcaaactcctgacctcaggtgatccacccgccttggcctcccaaagtgctggggttataggcgtgagccgctgcgcctggccaagatgagctttaataggaataagaggacttgctttagtgagcgggtaacacacgtcttaacttgcttgccttaagttgctagaatgtagggtggggatctgctgaaacaagatgaggcgtgagggagggattgctctggtgagtaatagtgtttacttcaatatgtagaaaaacaaactaagaacagatgatctgctctaatgaacagcctggaagcaagcgaaggggtctgctttaatgagcaagagagtgagcttgtgtgagatcagtcaaagggtatgttttaatgaaaatgagcggacctggttcagtgaccagatagagtggaaggagctgccctgaggtacaggagacttccaataggcaggtaaaaagtggttattagagtctgggtgcagtggcctacacctgtaagcccagcgctttgggaggccgaggtggggcggatcacttgaggtcaggggttggagaccagcctgggcagcatggcgaaaccccgtctctactaaaaatacaaaaactagccggacgtcatggtacacgcatgtaatcccagctactgagaagcgcttgaacccgggaggcagaggttgcagtgagccaagatcataccactgcactccagcctgggcgacagagcaagactctgtctcaagctgggcgtggtggctcacgcctgtaatcccagcactttgggaggctgatgcgggtggatcacctgaggtcgggagtttgagaccagcctgaccaacatggagaaaccccgtctttactaagagtacaaaattagccgagcgtggtggcgcatgcctgtaattccagctactcaggaggctgaggcaggattgttgcttgaacctgggaggcagaggttgcagtgagccaagagcgcatcattgcactccgctccagcctgggttacaagactctgtctcaaaaaaaaaaaaaagtggggggttattagagaagtcagccttgaccgaagtgagttgatctggtgtgtgagtgtaaagggtaagtcagtgacctgcccgtaatgaacagatgggaaagtagttaccggcgtgctttggcgagtgggaagcctctttggggggcaggaaagaggcagtttatgggttccactttagtaaggaaacacggacaaagatcatagtggttgtgagcagtcaaccaggtcagcccctgtgctttgtgggccttaaatgattacatcttcataacggcctagtgagggaggtatccacatcctcattttgggggcacggaggagctaagcctcttgtgtgaggtcccacagtccatgcaagggtgttattccattctagagtgttttgctgtagagttactgcttttaactgttaggcttttgaagtaaaaaccacaggtatctttgtgggaggaaaaagacagtaaaaaccagagaactagaagttatgctgagaagtggccatcctgggtcccaagtccacttctgtggccctccctgggcttcagtgtcaactgatgacttgctttcttccttttttttttccccctgagatgagatctcactatgttgctcaggctggcatcaaactcctgggctcaagcgatcctcccacctcagcctcccagagtgctgggattacaggcgtgagccaccatgcagggaagaggttccctgtttgtctggaagaccctcctatgtggctgtgggcgtgactcttcgtgtccccagcatggggcctgcctcctgctggcccagcacttggttgtggagggtcagagcttgggcaccttgggccccatccttaggggcctctacctccaggtaggagcctggggacctccaagtctcctggggtgacttgggattcaggtctgatggctcccatggaggtgaatagggtgggtggtctttggcagtgggtagggctgaggccttgacttgttctctttcccattcttagggctgacaaagaagagaaccaaagtccagaagaagtcactgcttctcaagaaaccccttcgggttgacctcatcctcgagaacacatccaaagtccctgcccccaaagagtgagtgtcccagcatccctgggcccttctttcccaccagactctggtcctaaagggtttccggggctgggggctggtaggtgagggtcatttgaagggtagggcaggctcaggtttgggcttcggagtgcagattagagggagggagtctgggtgccctggtgctgggccgaggcaggtgaggaggggcctggacccagctgggggcttcggggttggagaggaggggctgagtgggaggcgtgttcaggaggcacatcaggtgggtcttggggcatgagcgggtgagagggtggacagctggccttcccctgagatggggatgtggaggagtgggatttcgggtgatgctgaggttggttttgacgtggtggtgtgaggtgcctggggtatgtccaggacggggctgttgcttcgttgagtctggggctcagaggggaggcctaggctggagacagacgtggggagaggagttctctgaagagggggcggagtgccaccttttggagagggggtgctgaagctgccttaatggtggaggaagcccgacggggaggaggccctgctgccgttcaggctgccacctcacctgctgcacttgtgccccctctccccgaccagcgtcctcgcccaccaggtccccaacgccaagaagctcaggcggaaggagcagctatgggagaagctggccaagcagggcgagctgccccgggaggtgcgcagggcccaggcccggctcctcaacccttctgcaacaagggccaagcccgggccccaggacaccgtagagcggcccttctacgacctctgggcctcagacagtgagtgatcctgctgtcacctatgaatggggacaggacggccatgtgcagtttgtgtgtgttgtgcactgcacgagagtacagtgtgaaagggagtgctttgtgggtgctttggtgacctcccagcagagtcgtgcgtcctgaaggggcggccgtttcccactcgtgcttttcctttcctgagttgtgaggcttcaggaaaggaagccttcagctttggtctcttccactttctgaacccgtccagacacagttttgtcctggtgatcaaggcccttggggtctagaatcagtccttcccttgcctgagcttcagggtcacctttttgaaatgtggagggattgggggggagcctttggtgcctcttccatgctgggactgtcccagcagctcccctcgctgtatccacagaccccctggacaggccgttggttggccaggatgagtttttcctggagcagaccaagaagaaaggagtgaaggtgagatgtgtgggaagggcatcctgggtgatgggagggtgaggagggccgggagctgctctgtgttcctgcagtagagtctgtctcagagcccttccatcccagtggccgagaactctgtgctggagccaggtggctgggattcctgtcccagctccagtgctgactgatcctgggaaggtggtctcacctttctgcaacctatatcttcctctaaaatgcagatgagggccgggcatggtggctcacgcctgtaatcccagcacttcgggaggccgagacaggtggatcacctgaggtcgggagtttgagaccagcctgaccaacgtggtgaaaccctgtctctactaaaaatacaaaaaaaaaattagctgggcttggtggcacgtgcctgtagtcccagctattagggaggctgaggcaggagaatcgcttggaccagggaggtggaggtggcagtgagccgagatcatgccactgcactccagcctgggcaacaagagcgaaactctgtctcaaaaaaaaaaataaaataaaatacagatgaaattgtacttagatcatgggtcggtggggagaatgtaaagaggtagcacatgagaaggtggagcccgtgctggcaagtggcagaagtgtcacgggtttgagtttggatttgcagcctccttcttgagctgctggaccccaagtgttagagcccaggtgcttacaatctccggggctcagcctcgtgggtagcagaggataggctgctatcctttttctgagatggagtcttgctctggagtcacctgaatgccccttgagctcttcccacacccaaccactggcaaggcctggagcatctgccccatggctgtgtcctgggtcacccgcagccccaacgcacggccttaccctgcctcggccttttctccacagcggccagcacgcctgcacaccaagccgtcccaggcacccgccgtggaggtggcgcctgccggagcttcctacaatccatcctttgaagaccaccaggtacactgccccgtccaggcctccctcctcagtgggctctgcctcttggtcaggccttcactagcttcctccctgtgctgggaactccaatgacccagacagccctgggcctgtccgcaacggggctcacggtccagtgcaagagacctgttcccagacagtgatgggcagagtggttggggctgggagcccagacggggcacctggcccagcctggggggtcaggaagggctcccgggaggaggggtcgcctgagccgaggcagaggctgagggaggggtttgcagtgggaggaggggagtgggttttccaggtggtgggaacagcactgcaaaggcacagagttgagagagaccgtggcgccttccaggaagcctgtggggcagagatgaaaaaggctgtggtgacacggtggcacactggcagccaagtgacagttatatatgggcgaggctagctcagcgatgggaaagtctagctggagccactgtgcatttagcgggcatctgttgagcacagatgctgtggacaaaggggacaaaaacccctcccttggccgggtgcggtgcctcacacctgtaatcccagcactttgggaggctgaggcgggcagatcattggaggtcaggagttggagaccagcctgaccaacatggtgaaaccctgtctctactaaatacagaaaattagcagggcatggcagcacgcatctgtggtcccaactgcttgggaggctgaggtgggaggattgcttgagcccaggaggtccaggctgcagtgagctatgatcgcaccacggcactgcagcctgtgtaacagagcgagactcaaaaaacaagcacaaccctccctcaaggaacagcccttctcatggggtcacgtgactggagagatgctgagatgtttgcggtagatgcaggaccgcttgtccgaatcgttttcagcattcataagaaggagatagctagccaggaacagaggcagcttcctcatctggtagagaaaagtgtctgcggaaaaaagcaacagtgtgctcatggttgaaagcgtgagggtgccgctcactgccatctgttcctggaccagatgtgggagggggcgtggagatcagacattcacttttagatttgtacagaactacttcgtagagataaaattcacttaaccatacggtcagcctagttagagtatgtgattcagtggcttttagtgaccattgtgtaaccatccccgcagtcaattttagaacattttcactgtccgtaaaggaaacctcacacatgtcagccatcacccccgcaattccctgtctcgtgtggtcttgggctgccaggcttcctgtctcagggaccagcccaccctgaccaattcacatagatgaaactgtgggccgggcatggtggctcacacctgtaatcccagcactttgggaggccgaggtaggtggaccacctgaggtcaggagttcaagaccagcctgaccaacatggagaaaccccatctctactaaagttacagaattagccgggtatggtggcacatgcctgtaatagtagctactcgggaggctgaggcaggagaatcgcttgaacccaggaggcgggggttgtggtgagctgagatcacaccattgcactccagtctgggcaacaagacagaaactctatctcaaaaaaaaaatgtgaagcgtgcaggtcagactgccttcacagacgtgcagagcaggtgtgagggcgagggtttgaggtgccctctggctctgtgcagggtgggtgtgctggtagacggggtgtggggaggaaagcctgggccggggcgggatccacgggcactggatgagggacagatgggaggtaagagggtctagtctcagtgtcccaggaggggttcagggacccatcctcactcccgcccctcagaccctgctctcagcggcccacgaggtggagttgcagcggcagaaggaggcggagaagctggagcggcagctggccctgcccgccacggagcaggccgccacccaggtgagccccgcacctgcccactccctcccctccccgggcctcctacccacccctgacactgcaccccgcctccccaggagtccacattccaggagctgtgcgaggggctgctggaggagtcggatggtgagggggagccaggccagggcgaggggccggaggctggggatgccgaggtctgtcccacgcccgcccgcctggccaccacagagaagaagacggagcagcagcggcggcgggagaaggctgtgcacaggctggtgagcgcctgggccagcggggcctgcctctgatgcctcgcccccttccttccttcctcccaccatgggctgccctgggtgctgcgggcagcctgcacaccccaagccccgcatgtggcctgtggtttgggctgtttgggatcctcacagctgagactcatttcccagcctcttccaggcagggctcgggctggggtgggacagggtccctggcgcttctgtttgaggggcggggtggggggaggtttctgcaccgcagaccaggggagatggatgacaaaaggggcttcagcaaacagctgctgggaaggcactggaggggccgctgatgtgacggggttaggaagggcctccggggacaggcaggtttgtgcagggaaggctccctgtgtagagagaaggtctccctgtgtgggcagcaccggcctgagccctgaccctcccccgtctccacagcgggtacagcaggccgcgttgcgggccgcccggctccggcaccaggagctgttccggctgcgcgggatcaaggcccaggtggccctgaggctggcggagctggcgcggcggcagaggcggcggcaggcgcggcgggaggctgaggctgacaagccccgaaggctggggcggctcaagtgagaaccaggccgggggttctgggagaggctggggagggggccgggtcccaggtcctgacaccttcctgcctttgttcaggaactgcccaccccccccatcgggagaccacctcttcccccacaaaaccccacattctcagaggccccttcttctccaggagggggctttggactgggtgtcctgggccccgcgggggtgatatttctgaacacccgccctgttctgcaggtaccaggcacctgacatcgacgtgcagctgagctcggagctgacagactcgctcaggaccctgaaggtgctcactgtgtcctgccgtggagccccgtgcccagtgatgacaccatccttgctccccgtgccccccaggggctatgggcgacaccatggctgcccctgggctgggccagtggggccaatgcccaggggctgagggcacgggatgctgggatgagatcccagggtgaggggccaggctaaggtttgagtccgggaccctaagaaggcctttccttccagctggtccctgttgcagtcccggtcacctttaggactagagggaccttcctgaagctcagaaccaaccctgtccctcccctgctcggaacctgctgtggctccccagtgcccctgaggaagcccagctcctctgtcagccacacgcctgggccgacccggccgtggggctccagccagttgtgctcatgagcggactgtgccttctccctctgatccagcctttgccctcgctgtccccttttctgtgtcgtcaccagcccacttcccgtgactcctctaagcccagcttagagatggccataggttggtggctgtcatcccaacactgagccccagcagctgagggccaggctgagtccctggtgcccacaggctgccctggggggagactgcatggggctgagccctgccaggaccccgaggagaggtccaggcccttgggcttctgccaggccctgctgaggcctccctctctgtcctgtagcccgagggcaacatccttcgagaccggttcaagagcttccagaggaggaatatgatcgagcctcgagagagagccaagtaaggggcggccggggctgctgtggggcgagggcatctgggattggccccgggcactgattgctccattgtccctgctccaggttcaaacgcaagtacaaggtgaagctggtggagaagcgggcgttccgtgagatccagtgagtccacccggcttcggcgcaaggaagggagcccttctcccaccccgtggtgcccaccgagtcccagggccccttccagagtgtggctagtggctgagccacacccccttggccatgcccagaagaggccctgaaaccagagcggggttgggagggtccccaaagggaaactgaaaggcagggggtgtcaggtcggcagggggtatggggcaccctctcacccaccctcagctcctttcctctgtccccaggttgtagctgccatcagatgccggagactcgcccttcaataaaaaatctcttctagctgatcagtgggctccacgtgtggcttgtgtgcctcctgcgggcggctgctcccgggtgcagactctgcgtgtccccccgtggcgcacaagcatgtaggtgccagaactcaccgccagagcctggtgagggcctagggtgtgtctgaaggggtcatcagccgactggatcgtggtctgtccaatagctgtgaagctggcagcccttccaagcctgggcagatcctaaaaagacagcaggcagagggcgcagggcttatggcctggccggagttgggaggtgaagcagagggcacagggcttatggcctggccggaggtgggaggtgaagcagagggcgcggggcttatggcctgtctggaggtgggaggtgaagcagaggtgaggaggaggttcccccactggattccgacttggagaatagcccagttccttctgctgcgggtgacgtagcagctcttgccacactgatagaaggagtggtggcagctgacctctgccgatagaacacctgctatcgggtttaagcaggtggattcactcactgaactcacagcggcctaaccaatgagggctgtacttattcccattttaaaggtgaggaaatagggctgggcacagtggttcactcctgtaatcccatcactttgggaggctgaggcgggcagatcacttgagcccaggagtttgagaccagcctgggcaacatagccataccctatctctaccaaaaattcgccagttatggtgggatgcagctatggtcgcagctactggggaggctgaggtgggaggatcacctgagcttgggaggtggaagctgcagtgagccatgatcacgccattgcactgcagcctgggtgacagagggagacctgtaccaaaaacttaagtaacaaaggtgaggaaacagaggcacataaaatgaggtaattttcctcccttctgtgcctattttgaaaacgtttttaaaatctttacaagaaacgaaaaacttattctcactgtaaatcattgtcaaaacgtgtctgtcactgttgacctttgccctccagtcacatccacgcccctgttctggagctgcctgtcaagcagtcactgcagtgtggtttgagtgattatgctccctgtgtgattctattaaattacataatcgattagccaggcatggtggtgtgcacctgtagtcccagctcctggggaggctgaggtaggagaatcgcttgaacctgggaggtggaggctacagtgagctgagattgcgccactgcagtctctcctggatgacaaagaggaccctgtctcgacccccccaccccccaaaaaactaacgtaaatttcacgcatgtacttgtgaggatagaattggttttttttttttttggtgtcttaggatcacactgtgcgtgattctgcagcttgctgtcagtgcatcttggaggtaattctgtgtctgtacagaactgcttccttctgttttgtggctgtgtggaatcccattacgagggtgtgccttgtgtttcttaaccaggccagtgtggctcctcctaatgaaaccgaaacaatgtctttgtccacgtgcctttttacttgtgtctgtagttaagtacctggaagtgaatcttggctgaaggatacatgtgtctgtaacaggtcatttgataggttcaacccaattggtctccaaaggggctgtgctgatttttactctctggtagcataggaggagcctgcctgttgccgtgtagctttgctacggtgcgattccattatttttatttgattgtgtctggttaccagtgaggttgaacttttttttttttttgaggtagggttccccaggtgggagtgcaatggtgcaatcccagcttcttggctcactgcagccttgacctcctgggctcaagtgatcctcccacctccgtcctcccaagtagctgggattacaggcacatgccaccatgcctggctactttagtatttttattgaagatggggatttgccatgctgcccaggctggcctcaaactcctgacctcaagcgatccacccaccttggcttcccaaagtgctgggactacaggcatgagccactgtacctgtcttaaacatctccttatatgattgctgaccattcattcacattcctcttctgtgttggtacaaaccttttgaccatttttctcctgtgctgtttgtcattttcttgtttatttgtagtagctctttatttattgtggacccacagtctgtcatacacgtcgcaaacatttcccctaggctgcttttgacttttgactttgtatgtggtgtcttttgtcaggaaggaagggtgttacgttttctgttggtctttctccgttttatactatggcctttgggaaagcttctctaggacaaaatgtttataaaaatagagcaggcagtttataaaagaaatgagtgaggctgggcatggtggctcatgcctgtaatcccagcactttgggaggctgaggcgggtggatcacctgaggtcaggagttcaagaccagtctgaccaacatggagaaaccccgtctctactaaaagtactaaaaaattagccgggtgtggtggcgtgtgctggtagtcccagctacttggggggctgaggcaggagaattgtttgaacccgggaggtggaggttgcagtcagccgagatagtgccactgtactccagcctgggcgacagagtgagactccatctcaaaaaataataaaatataatataaataaataaataaataaaatagaagggagagacttacgtcagaacttcccacctccccaccacatgccacagaacaaggctttaaggagctatttctgctgttcttccccctcccatattaaataaaaaggtgtgttctgcaggtaggaaaacagctgtgtgtgtgtgtgttgggggcggcggggggtggatgtgtggacgatagagcagtagggagaggtaaaaatgaggccgggcatagtggctcacacttgtaatcccagcactttgggaggtggaggtgggtggatcacctgaggtcaggagttcgagaccagcctggccaacatggcgaaactccatctctcctaaaaaatataaaaattagctgggtatggtggcacgcacctatagtcccagctacttgggaggctgaggcaggagaatcacttgaacctgggaggcggaggttgcagtgagctgagaccgcaccactgcactccagcctgggcaacaagagtgaaactccatctcaggaaaaaaagaaaaaaaaaaacaccatctatcaaggaggccagcctctgacccagtgactctgccaggggtgactgaaggaaactgctggaaatggggaggaagctcttaatgcccggacacggcgattggagcgtcgggcacattcctggatacccaggggtgagggtggtcacagccactcaaggacaaactctgtggcctggacacttagtgtcctcaggaagtccttggtatttaattgcctgggaaaatgtgtctgtttccgtgtgtgaaatggggggtccacagcaaaggggtttgtgggtgtttgcacagaaatgacatttcacatccgaattttatgtcagaagcctaaaagtacagaattcagctgggcgcagtggctcacgcctgtaatcttgtcactttgggaggcccaggcaggaggattgcttgaggccaggaattggagaccaccctgggcaacacagcgatactccatctctagaaaaacattttttaggccggtgcagtggcacttgtaatcctagcactttaggaggttgaggtgggtggattgcttgagtccaggagttcaagaccagcctgggcaccatggcaaaatcccactggtttctacaaaagatggaaaaaattagccaggtatggtggtgtgtgccatgtagtcccagctactcaggtggctgaggtgggatgatcagctgagctttggaggttgaggttgcagggagccaaaatctactgcctttcagcctgggtgacacagtgagaccctgtctcaaaaaaaaaaaagttttaaattatttagtcatggtgttgtgctcctgtagtccttgctactcgggaggctgaggctggagcccaggaggtggaggctgcagcatagtataatgatgccactgtgctccatcctgggtgacagcgagactaaaacaaaatacagaactctggctaacaatttacaagccgaatttcactaatgtctgcagtttcctttgaaaaatgtaaaacaggcctggcgcggtggctcatgcctgtaatcccagcactttgggaggcaggcggatcacctgagggtcaggagtttgagaccagcctggccaacatggtgaaaccccatctctactaaaaatagcaaaagttagctgggtgtagtggcagggcgtctgtaatcccggctaggctacttgggaggctgaggcaggagaattacttgaaccccggaggcggaggttgcagtgagctgagatcacgccattatactccagcctgggcaacaagagtgaaactctgtctcaaaaaaagaaaaagaaaaaaaaaacgtaaaacaaggtggattaatgaacagatgccccataaaacaaaagcactgaaatgttaagggcagaatctaggtggtggggtatgggggtatgcacagaaaaattcccttgactttaactgaaagtgtcctaatagggaaatggcacattggggtttcggggccatgtaatggcacaggtttctatcatggccctgcacctgcttttgagtctgtaacttggtattatttttcctaaagcgggtcctccagattataaaagcctcaggcatcagccaggtacagtgactcacgcctgtaatcccagcattttgggaggctgaggtgggtggctcacctgaggtcaggaattcgagaccagcctggacaacatggtgaaaccccatctctactaaaaacacaaaaattacccaggcgtggtggcaggtgcctgtaatcccagctactcaggaggctgaggcaggagaatggcttgaacccaggaggcggagattgcagtgagccgagatcataccattgcactccagcctgggcaacagagtgacactccatctcaaaaacaagacaaaacaaaacaaaaagcttgtggcatgggtatgactttgctttttagaaggatggagaccagacgaatgtagtggcttgctcctgtcatcccagcccttcaggaggctgagttgggaggattgcttgaggccaggagtgagaccagcctgggcaacatagcaagaccccatctctaaaagaaaaaaaaaatgagctgggcataatggcatgtgcccatagtctcagctactcaggaggctgaggtgggaggatctcttgagtccaggagtttgaggctgcagtaaacggtgatcgtgc
